(19) United States
(12) Patent Application Publication
(10) Pub. No.: US 2024/0287453 A1
(43) Pub. Date: Aug. 29, 2024

(54) PERSISTENT ALLOGENEIC MODIFIED IMMUNE CELLS AND METHODS OF USE THEREOF

(71) Applicant: Beam Therapeutics Inc., Cambridge, MA (US)

(72) Inventors: Colby MALDINI, Cambridge, MA (US); Angelica MESSANA, Cambridge, MA (US); Jason Michael GEHRKE, Cambridge, MA (US); Leila PERARO, Cambridge, MA (US); Lauren YOUNG, Cambridge, MA (US)

(73) Assignee: Beam Therapeutics Inc., Cambridge, MA (US)

(21) Appl. No.: 18/441,740

(22) Filed: Feb. 14, 2024

Related U.S. Application Data
(63) Continuation of application No. PCT/US2022/075021, filed on Aug. 16, 2022.
(60) Provisional application No. 63/233,648, filed on Aug. 16, 2021.
(60) Provisional application No. 63/293,692, filed on Dec. 24, 2021.
(60) Provisional application No. 63/293,722, filed on Dec. 24, 2021.
(60) Provisional application No. 63/336,109, filed on Apr. 28, 2022.

(51) Int. Cl. C12N 5/078; A61K 35/17; C12N 15/11; C12N 15/85

(52) U.S. Cl. CPC C12N 5/0634; A61K 35/17; C12N 15/111; C12N 15/85; C12N 2510/00

(57) ABSTRACT

The present disclosure features allogeneic modified immune cells (e.g., T- or NK-cells) having increased persistence, increased resistance to immune rejection, or decreased risk of eliciting a host-versus-graft reaction, or a combination thereof. Methods for producing and using the same are also provided.

### CROSS-REFERENCE TO RELATED APPLICATIONS

[0001] This application is a continuation under 35 U.S.C. § 111(a) of PCT International Patent Application No. PCT/US2022/075021, filed Aug. 16, 2022, designating the United States and published in English, which claims priority to and the benefit of U.S. Provisional Application No. 63/233,648, filed Aug. 16, 2021, U.S. Provisional Application No. 63/293,692, filed Dec. 24, 2021, U.S. Provisional Application No. 63/293,722, filed Dec. 24, 2021, and U.S. Provisional Application No. 63/336,109, filed Apr. 28, 2022, the entire contents of all of which are incorporated by reference herein.

### SEQUENCE LISTING

[0002] The contents of the electronic sequence listing (180802-043604US_SL.xml; Size: 3,199,295 bytes; and Date of Creation: May 15, 2024) is herein incorporated by reference in its entirety.

### BACKGROUND OF THE INVENTION

[0003] Autologous and allogeneic immunotherapies are neoplasia treatment approaches in which immune cells expressing chimeric antigen receptors are administered to a subject. To generate an immune cell that expresses a chimeric antigen receptor (CAR), the immune cell is first collected from the subject (autologous) or a donor separate from the subject receiving treatment (allogeneic) and genetically modified to express the chimeric antigen receptor. The resulting cell expresses the chimeric antigen receptor on its cell surface (e.g., CAR-T cell), and upon administration to the subject, the chimeric antigen receptor binds to the marker expressed by the neoplastic cell. This interaction with the marker activates the CAR-T cell, which then kills the neoplastic cell. But for autologous or allogeneic cell therapy to be effective and efficient, significant conditions and cellular responses, such as T cell signaling inhibition, must be overcome or avoided. Autologous cell therapies have numerous disadvantages associated with having to usually obtain the starting material from the patient to be treated, including long manufacturing times and the requirement that the patient cells are suitable despite previous therapies or disease state. However, for allogeneic cell therapy, graft-versus-host disease (GVHD) and host rejection of CAR-T cells provide additional challenges. Currently, allogeneic T cells show limited persistence in patients. Thus, there is a significant need for techniques to increase the persistence of allogeneic CAR-T cells and other modified immune cells in vivo.

### SUMMARY OF THE INVENTION

[0004] By leveraging, e.g., base editing, the present disclosure shows that allogeneic immune cells can be modified to be resistant to T-cell-based or NK cell-based immune rejection. The present disclosure also features engineered allogeneic modified immune cells (e.g., T- or NK-cells) having increased persistence, increased resistance to immune rejection, and/or decreased risk of eliciting a host-versus-graft reaction, and methods of producing and using such cells, for example, in the treatment of neoplasias without the disadvantages of autologous cell therapies such as long manufacturing times, or the need for an adequate supply of sufficiently healthy autologous donor cells.

[0005] In one aspect, the invention of the disclosure features a method for producing a persistent allogeneic modified immune cell. The method involves contacting a cell with a base editor containing a polynucleotide programmable DNA binding polypeptide (napDNAbp), a deaminase, and one or more guide RNAs (gRNAs) that target the base editor to effect an alteration in a nucleic acid molecule, thereby producing a persistent allogeneic modified immune cell. The nucleic acid molecule encodes a polypeptide and/or contains a regulatory element associated with expression thereof. The polypeptide is selected from one or more of HLA-A, HLA-B, HLA-C, Transporter Associated with Antigen Processing I (TAP1), Transporter Associated with Antigen Processing II (TAP2), Tapasin/TAP Binding Protein (TAPBP), TAP-Binding Protein-Like (TAPBPL), NLR family CARD domain containing 5 (NLRC5)/MHC class I transactivator (CITA), cluster of differentiation 155 (CD155), MHC class I polypeptide-related sequence A (MICA), MHC class I polypeptide-related sequence B (MICB) polypeptide, nectin cell adhesion molecule 2 (Nectin-2), and UL16 binding protein 1-6 (ULBP).

[0006] In another aspect, the invention of the disclosure features a method for producing a persistent allogeneic modified immune cell. The method involves contacting a cell with a base editor containing a polynucleotide programmable DNA binding polypeptide (napDNAbp), a deaminase, and guide RNAs (gRNAs) that target the base editor to effect an alteration in one or more nucleic acid molecules, where the one or more nucleic acid molecules encode the following polypeptides and/or contain regulatory elements associated with expression thereof. CD5, B2M, CD3 gamma, CD3 epsilon, CIITA, and PD-1 (PD1), thereby producing the persistent allogeneic modified immune cell.

[0007] In another aspect, the invention of the disclosure features a method for producing a persistent allogeneic modified immune cell. The method involves contacting a cell with a base editor containing a polynucleotide programmable DNA binding polypeptide (napDNAbp), a deaminase, and guide RNAs (gRNAs) that target the base editor to effect an alteration in one or more nucleic acid molecules, thereby producing the persistent allogeneic modified immune cell. The one or more nucleic acid molecules encode the following polypeptides and/or comprise regulatory elements associated with expression thereof: HLA-A, HLA-B, and CIITA. The persistent allogeneic modified immune cell surface-expresses HLA-C.

[0008] In another aspect, the invention of the disclosure features a method for producing a persistent allogeneic modified immune cell. The method involves contacting a cell with a base editor containing a polynucleotide programmable DNA binding polypeptide (napDNAbp), a deaminase, and two or more guide RNAs (gRNAs) that target the base editor to effect an alteration in two or more nucleic acid molecules, thereby producing a persistent allogeneic modified immune cell. The nucleic acid molecules encode a polypeptide and/or contain a regulatory element associated with expression thereof. A first polypeptide is selected from the one or more of HLA-A, HLA-B, HLA-C, Transporter Associated with Antigen Processing I (TAP1), Transporter Associated with Antigen Processing II (TAP2), Tapasin/TAP Binding Protein (TAPBP), TAP-Binding Protein-Like (TAPBPL), NLR family CARD domain containing 5 (NLRC5)/MHC class I transactivator (CITA), cluster of differentiation 155 (CD155), MHC class I polypeptide-related sequence A (MICA), MHC class I polypeptide-related sequence B (MICB) polypeptide, nectin cell adhesion molecule 2 (Nectin-2), and UL16 binding protein 1-6 (ULBP). The second polypeptide is selected from one or more of beta-2 microglobulin, CD48, CD58, Protein Disulfide Isomerase Family A Member 3 (PDIA3/ERp57), and T Cell Receptor Alpha Constant polypeptides.

[0009] In another aspect, the invention of the disclosure features a method for producing a persistent allogeneic modified immune cell. The method involves (a) contacting a cell with a base editor containing a polynucleotide programmable DNA binding polypeptide (napDNAbp), a deaminase, and one or more guide RNAs (gRNAs) that target a nucleic acid molecule. The nucleic acid molecule encodes a polypeptide or contains a regulatory element associated with expression of the polypeptide. The polypeptide is selected from one or more of HLA-A, HLA-B, HLA-C, Transporter Associated with Antigen Processing I (TAP1), Transporter Associated with Antigen Processing II (TAP2), Tapasin/TAP Binding Protein (TAPBP), TAP-Binding Protein-Like (TAPBPL), NLR family CARD domain containing 5 (NLRC5)/MHC class I transactivator (CITA), cluster of differentiation 155 (CD155), MHC class I polypeptide-related sequence A (MICA), MHC class I polypeptide-related sequence B (MICB) polypeptide, nectin cell adhesion molecule 2 (Nectin-2), and UL16 binding protein 1-6 (ULBP). The method further involves (b) overexpressing in the cell an inhibitory receptor, or fragment thereof, selected from one or more of Human Leukocyte Antigen-E (HLA-E), Human Leukocyte Antigen-G (HLA-G), Programmed Death Ligand 1 (PD-L1), and Cluster of Differentiation 47 (CD47).

[0010] In another aspect, the invention of the disclosure features an allogeneic modified immune cell produced according to the method of any of the above aspects, or embodiments thereof.

[0011] In another aspect, the invention of the disclosure provides an allogeneic modified immune cell containing a nucleobase alteration that reduces or eliminates expression of a polypeptide selected from one or more of HLA-A, HLA-B, HLA-C, Transporter Associated with Antigen Processing I (TAP1), Transporter Associated with Antigen Processing II (TAP2), Tapasin/TAP Binding Protein (TAPBP), TAP-Binding Protein-Like (TAPBPL), NLR family CARD domain containing 5 (NLRC5)/MHC class I transactivator (CITA), cluster of differentiation 155 (CD155), MHC class I polypeptide-related sequence A (MICA), MHC class I polypeptide-related sequence B (MICB) polypeptide, nectin cell adhesion molecule 2 (Nectin-2), and UL16 binding protein 1-6 (ULBP).

[0012] In another aspect, the invention of the disclosure features a pharmaceutical composition containing an effective amount an allogeneic modified immune cell of any of the above aspects, or embodiments thereof.

[0013] In another aspect, the invention of the disclosure features a composition containing a guide RNA (gRNA) and a polynucleotide encoding a base editor containing a polynucleotide programmable DNA binding polypeptide (napDNAbp) domain and a deaminase domain. The gRNA contains a nucleic acid sequence that is complementary to a polynucleotide. The polynucleotide encodes a polypeptide or contains a regulatory element associated with expression of the polypeptide. The polypeptide is selected from one or more of HLA-A, HLA-B, HLA-C, Transporter Associated with Antigen Processing I (TAP1), Transporter Associated with Antigen Processing II (TAP2), Tapasin/TAP Binding Protein (TAPBP), TAP-Binding Protein-Like (TAPBPL), NLR family CARD domain containing 5 (NLRC5)/MHC class I transactivator (CITA), cluster of differentiation 155 (CD155), MHC class I polypeptide-related sequence A (MICA), MHC class I polypeptide-related sequence B (MICB) polypeptide, nectin cell adhesion molecule 2 (Nectin-2), and UL16 binding protein 1-6 (ULBP).

[0014] In another aspect, the invention of the disclosure features a kit containing an allogeneic modified immune cell or composition of any of the above aspects, or embodiments thereof.

[0015] In another aspect, the invention of the disclosure features a method of treating cancer in a subject. The method involves administering to the subject an effective amount of an allogeneic modified immune cell of any of the above aspects, or embodiments thereof. In another aspect, the invention of the disclosure features a fusion polypeptide containing a loading peptide, at least a fragment of an HLA-G polypeptide, and at least a fragment of a β2M polypeptide.

[0016] In another aspect, the invention of the disclosure features a fusion polypeptide containing a loading peptide, at least a fragment of an HLA-E polypeptide, and at least a fragment of a β2M polypeptide.

[0017] In another aspect, the invention of the disclosure features a fusion polypeptide containing a loading peptide, and at least a fragment of an HLA-E polypeptide. In another aspect, the invention of the disclosure features a fusion polypeptide containing an amino acid sequence with at least 85% sequence identity to a sequence selected from one or more of:

HLA-G5+ IL-2 signal peptide
(SEQ ID NO: 1013)
MYRMQLLSCIALSLALVTNSGSHSMRYFSAAVSRPGRGEPRFIAMGYVDDTQFVRFDSDSACPR
MEPRAPWVEQEGPEYWEEETRNTKAHAQTDRMNLQTLRGYYNQSEASSHTLQWMIGCDLGSDGR
LLRGYEQYAYDGKDYLALNEDLRSWTAADTAAQISKRKCEAANVAEQRRAYLEGTCVEWLHRYL
ENGKEMLQRADPPKTHVTHHPVFDYEATLRCWALGFYPAEIILTWQRDGEDQTQDVELVETRPA
GDGTFQKWAAVVVPSGEEQRYTCHVQHEGLPEPLMLRWSKEGDGGIMSVRESRSLSEDL;
HLA-G5 Single chain trimer + IL-2 signal peptide
(SEQ ID NO: 1014)
MYRMQLLSCIALSLALVTNSIQRTPKIQVYSRHPAENGKSNFLNCYVSGFHPSDIEVDLLKNGE
RIEKVEHSDLSFSKDWSFYLLYYTEFTPTEKDEYACRVNHVTLSQPKIVKWDRDMGGGGSGGGG
SGGGGSRIIPRHLQLGGGGSGGGGSGGGGSGGGGSGSHSMRYFSAAVSRPGRGEPRFIAMGYVD
DTQFVRFDSDSACPRMEPRAPWVEQEGPEYWEEETRNTKAHAQTDRMNLQTLRGYYNQSEASSH
TLQWMIGCDLGSDGRLLRGYEQYAYDGKDYLALNEDLRSWTAADTAAQISKRKCEAANVAEQRR
AYLEGTCVEWLHRYLENGKEMLQRADPPKTHVTHHPVFDYEATLRCWALGFYPAEIILTWQRDG
EDQTQDVELVETRPAGDGTFQKWAAVVVPSGEEQRYTCHVQHEGLPEPLMLRWSKEGDGGIMSV
RESRSLSEDL;
HLA-E(ΔTM) Single chain trimer + HLA-G5 intron tail
(SEQ ID NO: 1015)
MSRSVALAVLALLSLSGLEAVMAPRTLFLGGGGSGGGGSGGGGSIQRTPKIQVYSRHPAENGKS
NFLNCYVSGFHPSDIEVDLLKNGERIEKVEHSDLSFSKDWSFYLLYYTEFTPTEKDEYACRVNH
VTLSQPKIVKWDRDMGGGGSGGGGSGGGGSGGGGSGSHSLKYFHTSVSRPGRGEPRFISVGYVD
DTQFVRFDNDAASPRMVPRAPWMEQEGSEYWDRETRSARDTAQIFRVNLRTLRGYYNQSEAGSH
TLQWMHGCELGPDGRFLRGYEQFAYDGKDYLTLNEDLRSWTAVDTAAQISEQKSNDASEAEHQR
AYLEDTCVEWLHKYLEKGKETLLHLEPPKTHVTHHPISDHEATLRCWALGFYPAEITLTWQQDG
EGHTQDTELVETRPAGDGTFQKWAAVVVPSGEEQRYTCHVQHEGLPEPVTLRWSKEGDGGIMSV
RESRSLSEDL;
HLA-E(ΔTM) β2M (C-term) Single chain trimer
(SEQ ID NO: 1016)
MSRSVALAVLALLSLSGLEAVMAPRTLFLGGSGGGASGGGSHSLKYFHTSVSRPGRGEPRFISV
GYVDDTQFVRFDNDAASPRMVPRAPWMEQEGSEYWDRETRSARDTAQIFRVNLRTLRGYYNQSE
AGSHTLQWMHGCELGPDGRFLRGYEQFAYDGKDYLTLNEDLRSWTAVDTAAQISEQKSNDASEA
EHQRAYLEDTCVEWLHKYLEKGKETLLHLEPPKTHVTHHPISDHEATLRCWALGFYPAEITLTW
QQDGEGHTQDTELVETRPAGDGTFQKWAAVVVPSGEEQRYTCHVQHEGLPEPVTLRWGGGGSGG
GGSGGGGSIQRTPKIQVYSRHPAENGKSNFLNCYVSGFHPSDIEVDLLKNGERIEKVEHSDLSF
SKDWSFYLLYYTEFTPTEKDEYACRVNHVTLSQPKIVKWDRDM;
HLA-E(ΔTM) Single chain dimer + HLA-G5 intron tail
(SEQ ID NO: 1017)
MSRSVALAVLALLSLSGLEAVMAPRTLFLGGSGGGASGGGSHSLKYFHTSVSRPGRGEPRFISV
GYVDDTQFVRFDNDAASPRMVPRAPWMEQEGSEYWDRETRSARDTAQIFRVNLRTLRGYYNQSE
AGSHTLQWMHGCELGPDGRFLRGYEQFAYDGKDYLTLNEDLRSWTAVDTAAQISEQKSNDASEA
EHQRAYLEDTCVEWLHKYLEKGKETLLHLEPPKTHVTHHPISDHEATLRCWALGFYPAEITLTW
QQDGEGHTQDTELVETRPAGDGTFQKWAAVVVPSGEEQRYTCHVQHEGLPEPVTLRWSKEGDGG
IMSVRESRSLSEDL;
and
HLA-E(ΔTM) Single chain dimer
(SEQ ID NO: 1018)
MSRSVALAVLALLSLSGLEAVMAPRTLFLGGSGGGASGGGSHSLKYFHTSVSRPGRGEPRFISV
GYVDDTQFVRFDNDAASPRMVPRAPWMEQEGSEYWDRETRSARDTAQIFRVNLRTLRGYYNQSE
AGSHTLQWMHGCELGPDGRFLRGYEQFAYDGKDYLTLNEDLRSWTAVDTAAQISEQKSNDASEA
EHQRAYLEDTCVEWLHKYLEKGKETLLHLEPPKTHVTHHPISDHEATLRCWALGFYPAEITLTW
QQDGEGHTQDTELVETRPAGDGTFQKWAAVVVPSGEEQRYTCHVQHEGLPEPVTLRW.

[0018] In another aspect, the invention of the disclosure features a membrane-bound fusion polypeptide. The fusion polypeptide contains a β2M domain and an HLA-E domain and/or a transmembrane domain.

[0019] In another aspect, the invention of the disclosure features a fusion polypeptide containing an amino acid sequence having at least 85% sequence identity to the following sequence:

(SEQ ID NO: 1019)
MSRSVALAVLALLSLSGLEAVMAPRTLFLGGGGSGGGGSGGGGSIQRTPK
IQVYSRHPAENGKSNFLNCYVSGFHPSDIEVDLLKNGERIEKVEHSDLSF
SKDWSFYLLYYTEFTPTEKDEYACRVNHVTLSQPKIVKWDRDMGGGGSGG
GGSGGGGSGGGGSGSHSLKYFHTSVSRPGRGEPRFISVGYVDDTQFVRFD
NDAASPRMVPRAPWMEQEGSEYWDRETRSARDTAQIFRVNLRTLRGYYNQ
SEAGSHTLQWMHGCELGPDGRFLRGYEQFAYDGKDYLTLNEDLRSWTAVD
TAAQISEQKSNDASEAEHQRAYLEDTCVEWLHKYLEKGKETLLHLEPPKT
HVTHHPISDHEATLRCWALGFYPAEITLTWQQDGEGHTQDTELVETRPAG
DGTFQKWAAVVVPSGEEQRYTCHVQHEGLPEPVTLRWKPASQPTIPIMAL
IVLGGVAGLLLFIGLGIFFCVRC.

[0020] In another aspect, the invention of the disclosure features a mammalian expression vector containing a polynucleotide sequence encoding the fusion polypeptide of any one of the above aspects, or embodiments thereof.

[0021] In another aspect, the invention of the disclosure features an allogeneic modified immune cell containing the vector of any of the above aspects, or embodiments thereof.

[0022] In another aspect, the invention of the disclosure features a method for producing a persistent allogeneic modified immune cell. The method involves contacting a cell with a polynucleotide programmable DNA binding polypeptide (napDNAbp) and one or more guide RNAs (gRNAs) that target the napDNAbp to cleave a target nucleic acid molecule and introduce an alteration in the target nucleic acid molecule, thereby producing a persistent allogeneic modified immune cell. The target nucleic acid molecule encodes a polypeptide and/or contains a regulatory element associated with expression thereof. The polypeptide is selected from one or more of HLA-A, HLA-B, HLA-C, Transporter Associated with Antigen Processing I (TAP1), Transporter Associated with Antigen Processing II (TAP2), Tapasin/TAP Binding Protein (TAPBP), TAP-Binding Protein-Like (TAPBPL), NLR family CARD domain containing 5 (NLRC5)/MHC class I transactivator (CITA), cluster of differentiation 155 (CD155), MHC class I polypeptide-related sequence A (MICA), MHC class I polypeptide-related sequence B (MICB) polypeptide, nectin cell adhesion molecule 2 (Nectin-2), and UL16 binding protein 1-6 (ULBP). In any of the above aspects, or embodiments thereof, the method further involves contacting the cell with one or more guide RNAs that target the base editor to effect an alteration in a nucleic acid molecule. The nucleic acid molecule encodes a polypeptide and/or contains a regulatory element associated with expression thereof. The polypeptide is selected from one or more of beta-2 microglobulin, CD48, CD58, Protein Disulfide Isomerase Family A Member 3 (PDIA3/ERp57), and T Cell Receptor Alpha Constant polypeptides.

[0023] In any of the above aspects, or embodiments thereof, the method involves effecting a nucleobase alteration that reduces expression on the cell of one or more polypeptides selected from one or more of HLA-A, HLA-B, and HLA-C. In any of the above aspects, or embodiments thereof, the one or more gRNAs contain a nucleotide sequence with at least about 85% sequence identity to GCACUCACCCGCCCAGGUCU (SEQ ID NO: 817; TSBTx4190), GACCCGCAUCUCGGCGUCUG (SEQ ID NO: 827; TSBTx4200), CCUUACCCCAUCUCAGGGUG (SEQ ID NO: 820; TSBTx4193), and/or CUUACCCCAUCUCAGGGUGA (SEQ ID NO: 821; TSBTx4194). In any of the above aspects, or embodiments thereof, the method involves effecting a nucleobase alteration that reduces or eliminates expression on the cell of HLA-A and HLA-B, and the persistent allogeneic modified immune cell expresses HLA-C. In any of the above aspects, or embodiments thereof, the method involves effecting a nucleobase alteration that reduces or eliminates expression on the cell of HLA-A and HLA-B, and the persistent allogeneic modified immune cell expresses HLA-C and B2M.

[0024] In any of the above aspects, or embodiments thereof, the method further involves overexpressing in the cell an inhibitory receptor, or fragment thereof, selected from one or more of Human Leukocyte Antigen-E (HLA-E), Human Leukocyte Antigen-G (HLA-G), Programmed Death Ligand 1 (PD-L1), and Cluster of Differentiation 47 (CD47).

[0025] In any of the above aspects, or embodiments thereof, the method involves reducing or eliminating detectable expression on the cell of one or more polypeptides selected from one or more of HLA-A, HLA-B, and HLA-C relative to a corresponding unmodified cell.

[0026] In any of the above aspects, or embodiments thereof, the method reduces detectable expression of one or more of HLA-A, HLA-B, HLA-C, TAP1, TAP2, TAPBP, TAPBPL, NLRC5/CITA, CD155, MICA, and MICB by at least 25%.

[0027] In any of the above aspects, or embodiments thereof, the guide RNAs contain a nucleotide sequence selected from those listed in Tables 1A-1E or from SEQ ID NOs: 1214-2908, 403-412, and 435-446. In any of the above aspects, or embodiments thereof, the guide RNAs contain a spacer sequence selected from those listed in Tables 1A, 1B, and 1D. In any of the above aspects, or embodiments thereof, the guide RNA's comprise a gRNA sequence selected from those listed in Tables 1A, 1B, 1C, or 1E, or from SEQ ID NOs: 1214-2908, 403-412, and 435-446.

[0028] In any of the above aspects, or embodiments thereof, the deaminase is a cytidine deaminase and/or an adenosine deaminase. In embodiments, the adenosine deaminase is TadA or a TadA variant. In embodiments, the TadA is a TadA*8 or TadA*9. In embodiments, the cytidine deaminase is APOBEC or an APOBEC variant.

[0029] In any of the above aspects, or embodiments thereof, the base editor is rBE4 or ABE8.20m. In any of the above aspects, the base editor is ABE8.20m.

[0030] In any of the above aspects, or embodiments thereof, the base editor contains a complex containing the deaminase, the polynucleotide programmable DNA binding polypeptide (napDNAbp), and the guide RNA, or the base editor contains a fusion protein containing the polynucleotide programmable DNA binding polypeptide (napDNAbp) fused to the deaminase.

[0031] In any of the above aspects, or embodiments thereof, the method further involves contacting the cell with one or more guide RNAs that target the base editor to effect an alteration in a nucleic acid molecule encoding a polypeptide selected from one or more of TCRα Chain (TRAC), and Class II, Major Histocompatibility Complex Transactivator (CIITA).

[0032] In any of the above aspects, or embodiments thereof, the modified immune cell has increased persistence in a host, increased resistance to immune rejection, and/or decreased risk of eliciting a host-versus-graft reaction.

[0033] In any of the above aspects, or embodiments thereof, the napDNAbp is a Cas9 or a Cas12. In any of the above aspects, or embodiments thereof, the napDNAbp is a Cas12b. In any of the above aspects, or embodiments thereof, the napDNAbp is a Streptococcus pyogenes Cas9 (SpCas9), a Staphylococcus aureus Cas9 (SaCas9), Streptococcus thermophilus 1 Cas9 (St1Cas9), or variants thereof. In any of the above aspects, or embodiments thereof, the napDNAbp contains a nuclease dead Cas9 (dCas9) or a Cas9 nickase (nCas9).

[0034] In any of the above aspects, or embodiments thereof, the base editor further contains one or more uracil glycosylase inhibitors (UGIs).

[0035] In any of the above aspects, or embodiments thereof, the base editor further contains one or more nuclear localization signals (NLS). In embodiments, the NLS is a bipartite NLS.

[0036] In any of the above aspects, or embodiments thereof, the guide RNA contains a modification. In embodiments, the modification is a 2′-O-methyl 3′-phosphorothioate. In any of the above aspects, or embodiments thereof, the guide RNA contains modifications at the 3′ and 5′ termini.

[0037] In any of the above aspects, or embodiments thereof, the modified immune cell is a T cell, an NK cell, or a macrophage cell.

[0038] In any of the above aspects, or embodiments thereof, the alteration disrupts a splice acceptor or splice donor site or is in a promoter, intron, exon, enhancer, or an untranslated region (UTR). In any of the above aspects, or embodiments thereof, the alteration encodes a missense mutation and/or is associated with reduced expression of the polypeptide.

[0039] In any of the above aspects, or embodiments thereof, the method further involves expressing a chimeric antigen receptor (CAR) in the modified immune cell.

[0040] In any of the above aspects, or embodiments thereof, the cell contacted with the base editor is obtained from a healthy subject. In any of the above aspects, or embodiments thereof, the modified immune cell is derived from a cell obtained from a healthy subject.

[0041] In any of the above aspects, or embodiments thereof, the cell further contains a nucleobase alteration that reduces or eliminates expression of a polypeptide selected from one or more of beta-2 microglobulin, CD48, CD58, Protein Disulfide Isomerase Family A Member 3 (PDIA3/ERp57), and T Cell Receptor Alpha Constant polypeptides. In any of the above aspects, or embodiments thereof, the cell further contains a nucleobase alteration that reduces or eliminates expression of one or more polypeptides selected from one or more of HLA-A, HLA-B, and HLA-C. In any of the above aspects, or embodiments thereof, the cell overexpresses one or more inhibitory receptors selected from one or more of Human Leukocyte Antigen-E (HLA-E), Human Leukocyte Antigen-G (HLA-G), Programmed Death Ligand 1 (PD-L1), and Cluster of Differentiation 47 (CD47).

[0042] In any of the above aspects, or embodiments thereof, the modified immune cell further contains at least one alteration in a nucleic acid molecule encoding a polypeptide selected from one or more of TCRα Chain (TRAC), Cluster of Differentiation 58 (CD58), and Class II, Major Histocompatibility Complex Transactivator (CIITA).

[0043] In any of the above aspects, or embodiments thereof, the modified immune cell has reduced or inactivated surface HLA class-I expression, increased persistence in a host, increased resistance to immune rejection, and/or decreased risk of eliciting a host-versus-graft reaction relative to an unmodified reference immune cell. In any of the above aspects, or embodiments thereof, the allogeneic modified immune cell has increased persistence as compared to an unmodified reference immune cell when administered to a subject. In any of the above aspects, or embodiments thereof, persistence is increased by at least about 1 month. In any of the above aspects, or embodiments thereof, the allogeneic modified immune cell has increased T- and/or NK-cell resistance (i.e., increased resistance to T- and/or NK-cell mediated immune rejection) as compared to a reference immune cell when administered to a subject.

[0044] In any of the above aspects, or embodiments thereof, the allogeneic modified immune cell is a T cell, an NK cell, or a macrophage cell. In any of the above aspects, or embodiments thereof, the allogeneic modified immune cell expresses a chimeric antigen receptor (CAR).

[0045] In any of the above aspects, or embodiments thereof, the subject is a human subject.

[0046] In any of the above aspects, or embodiments thereof, the composition further contains a nucleic acid sequence that is complementary to a polynucleotide. The polynucleotide encodes a polypeptide or contains a regulatory element associated with expression of the polypeptide. The polypeptide is selected from one or more of beta-2 microglobulin, CD48, CD58, Protein Disulfide Isomerase Family A Member 3 (PDIA3/ERp57), and T Cell Receptor Alpha Constant polypeptides.

[0047] In any of the above aspects, or embodiments thereof, the composition contains a spacer selected from one or more of GCACUCACCCGCCCAGGUCU (SEQ ID NO: 817; TSBTx4190), GACCCGCAUCUCGGCGUCUG (SEQ ID NO: 827; TSBTx4200), CCUUACCCCAUCUCAGGGUG (SEQ ID NO: 820; TSBTx4193), and/or CUUACCCCAUCUCAGGGUGA (SEQ ID NO: 821; TSBTx4194).

[0048] In any of the above aspects, or embodiments thereof, the composition further contains a polynucleotide encoding an inhibitory receptor, or a fragment thereof, selected from one or more of Human Leukocyte Antigen-E (HLA-E), Human Leukocyte Antigen-G (HLA-G), Programmed Death Ligand 1 (PD-L1), and Cluster of Differentiation 47 (CD47).

[0049] In any of the above aspects, or embodiments thereof, the composition further contains a polynucleotide encoding a secreted or membrane-bound HLA-E and/or HLA-G single-chain trimer and/or single-chain dimer.

[0050] In any of the above aspects, or embodiments thereof, the composition further contains a polynucleotide encoding a polypeptide(s) with at least 85% sequence identity to an amino acid sequence listed in Table 19 and/or to the following amino acid sequence:

(SEQ ID NO: 1019)
MSRSVALAVLALLSLSGLEAVMAPRTLFLGGGGSGGGGSGGGGSIQRTPK
IQVYSRHPAENGKSNFLNCYVSGFHPSDIEVDLLKNGERIEKVEHSDLSF
SKDWSFYLLYYTEFTPTEKDEYACRVNHVTLSQPKIVKWDRDMGGGGSGG
GGSGGGGSGGGGSGSHSLKYFHTSVSRPGRGEPRFISVGYVDDTQFVRFD
NDAASPRMVPRAPWMEQEGSEYWDRETRSARDTAQIFRVNLRTLRGYYNQ
SEAGSHTLQWMHGCELGPDGRFLRGYEQFAYDGKDYLTLNEDLRSWTAVD
TAAQISEQKSNDASEAEHQRAYLEDTCVEWLHKYLEKGKETLLHLEPPKT
HVTHHPISDHEATLRCWALGFYPAEITLTWQQDGEGHTQDTELVETRPAG
DGTFQKWAAVVVPSGEEQRYTCHVQHEGLPEPVTLRWKPASQPTIPIMAL
IVLGGVAGLLLFIGLGIFFCVRC

[0051] In any of the above aspects, or embodiments thereof, the composition further contains a polynucleotide encoding a polypeptide selected from one or more of Human Leukocyte Antigen-E (HLA-E), Human Leukocyte Antigen-G (HLA-G), Programmed Death Ligand 1 (PD-L1), and Cluster of Differentiation 47 (CD47).

[0052] In any of the above aspects, or embodiments thereof, the gRNA contains a sequence selected from those listed in Tables 1A-1E or in the Sequence Listing as SEQ ID NOs: 1214-2908, 403-412, or 435-446.

[0053] In any of the above aspects, or embodiments thereof, the polynucleotide encoding the base editor contains mRNA.

[0054] In any of the above aspects, or embodiments thereof, the kit contains written instructions for using the allogeneic modified immune cell or the composition.

[0055] In any of the above aspects, or embodiments thereof, the modified immune cell has increased persistence in the subject, increased resistance to immune rejection, or decreased risk of eliciting a host-versus-graft reaction relative to a reference immune cell.

[0056] In any of the above aspects, or embodiments thereof, the allogeneic modified immune cell is a T cell or NK cell.

[0057] In any of the above aspects, or embodiments thereof, the reference immune cell expresses a CAR and normal levels of a major histocompatibility complex, class I polypeptide.

[0058] In any of the above aspects, or embodiments thereof, the recombinant polypeptide contains from N-terminus to C-terminus: a) a loading peptide, at least a fragment of an HLA-G polypeptide, and at least a fragment of a β2M polypeptide; b) at least a fragment of a β2M polypeptide, a loading peptide, and at least a fragment of an HLA-G polypeptide; c) a loading peptide, at least a fragment of a β2M polypeptide, and at least a fragment of an HLA-G polypeptide; or d) fragment of an HLA-G polypeptide, a loading peptide, and at least at least a fragment of a β2M polypeptide.

[0059] In any of the above aspects, or embodiments thereof, the recombinant polypeptide contains from N-terminus to C-terminus: a) a loading peptide, at least a fragment of an HLA-E polypeptide, and at least a fragment of a β2M polypeptide; b) at least a fragment of a β2M polypeptide, a loading peptide, and at least a fragment of an HLA-E polypeptide; c) a loading peptide, at least a fragment of a β2M polypeptide, and at least a fragment of an HLA-E polypeptide; or d) fragment of an HLA-E polypeptide, a loading peptide, and at least at least a fragment of a β2M polypeptide.

[0060] In any of the above aspects, or embodiments thereof, the recombinant polypeptide contains from N-terminus to C-terminus: a loading peptide, and at least a fragment of an HLA-E polypeptide. In any of the above aspects, or embodiments thereof, the HLA-G or HLA-E polypeptide lacks a transmembrane domain. In any of the above aspects, or embodiments thereof, the recombinant polypeptide further contains an HLA-G5 intron tail. In any of the above aspects, or embodiments thereof, the fusion polypeptide further contains one or more polypeptide linkers.

[0061] In any of the above aspects, or embodiments thereof, the recombinant polypeptide contains an N-terminal signal peptide. In any of the above aspects, or embodiments thereof, the transmembrane domain is an HLA-E transmembrane domain.

[0062] In any of the above aspects, or embodiments thereof, the method further involves providing one or more guide RNAs that target the napDNAbp to cleave a nucleic acid molecule. The nucleic acid molecule encodes a polypeptide and/or contains a regulatory element associated with expression thereof. The polypeptide is selected from one or more of beta-2 microglobulin, CD48, CD58, Protein Disulfide Isomerase Family A Member 3 (PDIA3/ERp57), and T Cell Receptor Alpha Constant polypeptides.

[0063] In any of the above aspects, or embodiments thereof, the modified immune cell has increased persistence in a host, increased resistance to immune rejection, decreased risk of eliciting a host-versus-graft reaction.

[0064] In any of the above aspects, or embodiments thereof, the napDNAbp further contains one or more nuclear localization signals (NLS). In any of the above aspects, or embodiments thereof, the cleavage disrupts a splice acceptor or splice donor site or is in a promoter, intron, exon, enhancer, or an untranslated region (UTR). In any of the above aspects, or embodiments thereof, the cleavage introduces a missense mutation and/or is associated with reduced expression of the polypeptide.

[0065] In any of the above aspects, or embodiments thereof, the alteration contains an insertion or a deletion.

[0066] In any of the above aspects, or embodiments thereof, modified immune cell further comprises virtually undetectable levels of one or more polypeptides selected from the group consisting of: B cell leukemia/lymphoma 11b (Bcl11b); B cell leukemia/lymphoma 2 related protein A1d (Bcl2a1d); B cell leukemia/lymphoma 6 (Bcl6); butyrophilin-like 6 (Btnl6); CD151 antigen (Cd151); chemokine (C—C motif) receptor 7 (Ccr7); discs large MAGUK scaffold protein 5 (Dlg5); erythropoietin (Epo); G protein-coupled receptor 18 (Gpr18); interferon alpha 15 (Ifnal5); interleukin 6 signal transducer (Il6st); interleukin 7 receptor (117r); Janus kinase 3 (Jak3); membrane associated ring-CH-type finger 7 (Marchf7); NCK associated protein 1 like (Nckap11); phospholipase A2, group IIF (Pla2g2f); runt related transcription factor 3 (Runx3); Signal-regulatory protein beta 1B (Sirpb1b); transforming growth factor, beta 1 (Tgfb1); tumor necrosis factor (ligand) superfamily, member 14 (Tnfsf14); tumor necrosis factor (ligand) superfamily, member 18 (Tnfsf18); tumor necrosis factor (ligand) superfamily, member 8 (Tnfsf8); zinc finger CCCH type containing 8 (Zc3h8); (Rac family small GTPase 2); (Slc4a1); 5-azacytidine induced gene 2 (Azi2); a disintegrin and metalloprotease domain 17 (Adam 17); a disintegrin and metalloprotease domain 8 (Adam8); Acetyl-CoA Acetyltransferase 1 (ACAT1); ACLY; adapter related protein complex 3 beta 1 sububit (Ap3b1); adapter related protein complex 3 delta 1 sububit (Ap3d1); adenosine A2a receptor (Adora2a); adenosine deaminase (Ada); adenosine kinase (Adk); adenosine regulating molecule 1 (Adrm1); advanced glycosylation end product-specific receptor (Ager) allograft inflammatory factor 1 (Aif1); AKT1; AKT2; amyloid beta (A4) precursor protein-binding family B member 1 interacting protein (Apbblip); ankyrin repeat and LEM domain (Ankle1); annecin A1 (Anxa1); arginase liver (Arg 1); arginase type II (Arg 2); AtPase Cu++ transporting, alpha polypeptide (Atp7a); autoimmune regulator (Aire); autophagy related 5 (Atg5); AXL; B and T Lymphocyte Associated (BTLA); B and T lymphocyte associated (Btla); B cell leukemia/lymphoma 10 (Bcl10); B cell leukemia/lymphoma 11a (Bcl11a); B cell leukemia/lymphoma 2 (Bcl2); B cell leukemia/lymphoma 3 (Bcl3); basic leucine zipper transcription factor, ATF-like (Batf); BCL2-associated X protein (Bax); BCL2L11; beta 2 microglobulin (B2m); BL2-associated agonist of cell dealth (Bad); BLIMP1; Bloom syndrome, RecQ like helicase (Blm); Bmi1 polycomb ring finger oncogene (Bmi1); Bone morphogenic protein 4 (Bmp4); Braf transforming gene (Braf); butyrophilin, subfamily 2, member A1 (Btn2a1); butyrophilin, subfamily 2, member A2 (Btn2a2); butyrophilin-like 1 (Btnl1); butyrophilin-like 2 (Btnl2); c-abl oncogene 1 (Abl1); c-abl oncogene 2 (Abl2); cadherin-like 26(Cdh26); calcium channel, voltage dependent, beta 4 subunit (Cacnb4); CAMK2D; capping protein regulator and myosin 1 linker 2 (Carmil2); carcinoembryonic antigen-related cell adhesion molecule (Ceacam1); Casitas B-lineage lymphoma b (Cblb); CASP8; Caspase 3 (Casp3); caspase recruitment domain family member 11 (Card11); catenin (cadherin associated protein), beta 1 (Ctnnb1); caveolin 1 (Cav1); CBL-B; CCAAT/enhancer binding protein (C/EBP), beta (Cebpb); CCR10; CCR4; CCR5; CCR6; CCR9; CD103; CD11a; CD122; CD123; CD127; CD130; CD132; CD160 antigen (Cd160); CD161; CD19; CD1d1 antigen (Cd1d1); CD1d2 antigen (CD1d2); CD2 antigen (CD2); CD209e antigen (Cd209e); CD23; CD244 molecule A (Cd244a); CD24a antigen (Cd24a); CD27 antigen (CD27); CD274 antigen (Cd274); CD276 antigen (Cd276); CD28 antigen (Cd28); CD3 delta; CD3 epsilon; CD3 gamma; CD30; CD300A molecule (Cd300a); CD33; CD38; CD4 antigen (Cd4); CD40 ligand (Cd40lg); CD44 antigen (Cd44); CD46 antigen, complement regulatory protein (Cd46); CD47 antigen (Rh-related antigen, integrin-associated signal transducer) (Cd47); CD48 antigen (Cd48); CD5 antigen (Cd5); CD52; CD58; CD59b antigen (Cd59b); CD6 antigen (Cd6); CD69; CD7; CD70; CD74 antigen (Cd74); CD8; CD8 antigen (Cd8); CD80 antigen (Cd80); CD81 antigen (Cd81); CD82; CD83 antigen (Cd83); CD86; CD86 antigen (Cd86); CD8A; CD96; CD99; CDK4; CDK8; CDKN1B; chemokine (C motif) ligand 1 (Xcl1); chemokine (C—C motif) ligand 19 (Ccl19); chemokine (C—C motif) ligand 2 (Ccl2); chemokine (C—C motif) ligand 20 (Ccl20); chemokine (C—C motif) ligand 5 (Ccl5); chemokine (C—C motif) receptor 2 (Ccr2); chemokine (C—C motif) receptor 6 (Ccr6); chemokine (C—C motif) receptor 9 (Ccr9); chemokine (C—X—C motif) ligand 12 (Cxcl12); chemokine (C—X—C motif) receptor (Cxcr4); Chitinase 3 Like 1 (Chi311); cholinergic receptor, nicotinic, alpha polypeptide 7 (Chrna7); chromodomain helicase DNA binding protein 7 (Chd7); CLA; Class II Major Histocompatibility Complex Transactivator (CIITA); cleft lip and palate associated transmembrane protein 1 (Clptm1); Cluster of Differentiation 123 (CD123); Cluster of Differentiation 3 (CD3); Cluster of Differentiation 33 (CD33); Cluster of Differentiation 52 (CD52); Cluster of Differentiation 7 (CD7); Cluster of Differentiation 96 (CD96); coagulation factor II (thrombin) receptor-like 1 (F2rl1); coil-coil domain containing 88B (Ccdc88b); core-binding factor beta (Cbfb); coronin, actin binding protein 1A (Coro1a); coxsackie virus and adenovirus receptor (Cxadr); CS-1; CSF2CSK; c-src tyrosine kinase (Csk); C-type lectin domain family 2, member i (Clec2i); C-type lectin domain family 4, member a2 (Clec4a2); C-type lectin domain family 4, member d (Clec4d); C-type lectin domain family 4, member e (Clec4e); C-type lectin domain family 4, member f (Clec4f); C-type lectin domain family 4, member g (Clec4g); CUL3; CXCR3; cyclic GMP-AMP synthase (Cgas); cyclin D3 (Ccnd3); cyclin dependent kinase inhibitor 2A (Cdkn2a); cyclin-dependent kinase (Cdk6); CYLD lysine 63 deubiquitinase (Cyld); cysteine-rich protein 3 (Crip3); cytidine 5′-triphosphate synthase (Ctps); Cytochrome P450 Family 11 Subfamily A Member 1 (Cyp11a1); cytochrome P450, family 26, subfamily b, polypeptide (Cyp26b1); Cytokine Inducible SH2 Containing Protein (CISH); cytotoxic T lymphocyte-associated protein 2 alpha (Ctla2a); Cytotoxic T-Lymphocyte Associated Protein 4 (CTLA-4); DCK; dedicator of cytokinesis 2 (Dock2); dedicator of cytokinesis 8 (Dock8); delta like canonical Notch ligand 4 (D114); deltex 1, E3 ubiquitin ligase (Dtx1); deoxyhypusine synthase (Dhps); DGKA; DGKZ; DHX37; dicer 1, ribonuclease type III (Dicer1); dipeptidylpeptidase 4 (Dpp4); discs large MAGUK scaffold protein 1 (Dlg1); DnaJ heat shock protein family (Hsp40) member A3 (Dnaja3); dolichyl-di-phosphooligosaccharide-protein glycotransferase (Ddost); double homeobox B-like 1 (Duxbl1); drosha, ribonuclease type III (Drosha); dual specificity phosphatase 10 (Dusp10); dual specificity phosphatase 22 (Dusp22); dual specificity phosphatase 3 (Dusp3); E74-like factor 4 (Elf4); early growth response 1 (Egr1); early growth response 3 (Egr3); ELOB (TCEB2); ENTPD1 (CD39); eomesodermin (Eomes); Eph receptor B4 (Ephb4); Eph receptor B6 (Ephb6); ephrin B1 (Efnbl); ephrin B2 (Efnb2); ephrin B3 (Efnb3); Epstein-Barr virus induced gene 3 (Ebi3); erb-b2 receptor tyrosine kinase (Erbb2); eukaryotic translation initiation factor 2 alpha kinase 4 (Eif2ak4); FADD; family with sequence similarity 49, member B (Fam49b); Fanconi anemia, complementation group A (Fanca); Fanconi anemia, complementation group D2 (Fancd2); Fas (TNF receptor superfamily member 6) (Fas); Fas (TNFRSF6)-associated via death domain (Fadd); Fas Cell Surface Death Receptor (FAS); Fc receptor, IgE, high affinity I, gamma polypeptide (Fcer1g); fibrinogen-like protein 1 (Fgl1); fibrinogen-like protein 2 (Fgl2); FK506 binding protein 1a (Fkbp1a); FK506 binding protein 1b ((Fkbp1b); flotillin 2 (Flot2); FMS-like tyrosine kinase (Flt3); forkhead box Ji (Foxj1); forkhead box N1 (Foxn1); forkhead box P1 (Foxp1); forkhead box P3 (Foxp3); frizzled class receptor 5 (Fzd5); frizzled class receptor 7 (Fzd7); frizzled class receptor 8 (Fzd8); fucosyltransferase 7 (Fut7); Fyn proto-oncogene (Fyn); gap junction protein, alpha 1 (Gja1); GATA binding protein 3 (GATA3); GCN2 kinase (IDO pathway); gelsolin (Gsn); GLI-Kruppel family member GLI3 (Gli3); glycerol-3-phosphate acyltransferase, mitochondrial (Gpam); growth arrest and DNA-damage-inducible 45 gamma (Gadd45g); GTPase, IMAP family member 1 (Gimap1); H1TET2; H2.0-like homeobox (Hlx); haematopoietic 1 (hem1); HCLS1 binding protein 3 (Hslbp3); heat shock 105 kDa/110 kDa protein 1 (Hsph1); heat shock protein 1 (chaperonin) (Hspd1); heat shock protein 90, alpha (cytosolic), class A member 1 (Hsp90aa1); hematopoietic SH2 domain containing (Hsh2d); hepatitis A virus cellular receptor 2 (Havcr2); hes family bHLH transcription factor 1 (Hes1); histocompatibility 2, class II antigen A, alpha (H2-Aa); histocompatibility 2, class II antigen A, beta 1 (H2-Abl); histocompatibility 2, class II, locus DMa (H2-DMa); histocompatibility 2, M region locus 3 (H3-M3); histocompatibility 2, O region alpha locus (H2-Oa); histocompatibility 2, T region locus 23 (H2-T23); HLA-DR; homeostatic iron regulator (Hfe); icos ligand (Icosl); IKAROS family zinc finger 1 (Ikzf1); IL10; IL10RA; IL2 inducible T cell kinase (Itk); IL6R; Indian hedgehog (Ihh); indoleamine 2,3-dioxygenase 1 (Idol); inducible T cell co-stimulator (Icos); inositol 1,4,5-trisphosphate 3-kinase B (Itpkb); insulin II (Ins2); insulin-like growth factor 1 (Igf1); insulin-like growth factor 2 (Igf2); insulin-like growth factor binding protein 2 (Igfbp2); integrin alpha L (Itgal); integrin alpha M (Itgam); integrin alpha V (Itgav); integrin alpha X (Itgax); integrin beta 2 (Itgb2); integrin, alpha D (Itgad); intercellular adhesion molecule 1 (Icam1); interferon (alpha and beta) receptor 1 (Ifnar1); interferon alpha 1 (Ifna1); interferon alpha 11 (Ifnal1); interferon alpha 12 (Ifnal2); interferon alpha 13 (Ifnal3); interferon alpha 14 (Ifnal4); interferon alpha 16 (Ifnal6); interferon alpha 2 (Ifna2); interferon alpha 4 (Ifna4); interferon alpha 5 (Ifna5); interferon alpha 6 (Ifna6); interferon alpha 7 (Ifna7); interferon alpha 9 (Ifna9); interferon alpha B (Ifnab); interferon beta 1 (Ifnb1); interferon gamma (Ifng); interferon kappa (Ifnk); interferon regulatory factor 1 (Irf1); interferon regulatory factor 4 (Irf4); interferon zeta (Ifnz); interleukin 1 beta (Il1b; interleukin 1 family, member 8 (Il1f8); interleukin 1 receptor-like 2 (Il1rl2); interleukin 12 receptor, beta1 (Il12rb1); interleukin 12a (1112a); interleukin 12b (1112b); interleukin 15 (I115); interleukin 18 (1118); interleukin 18 receptor 1 (I118r1); interleukin 2 (I12); interleukin 2 receptor, alpha chain (Il2ra); interleukin 2 receptor, gamma chain (Il2rg); interleukin 20 receptor beta (Il20rb); interleukin 21 (I121); interleukin 23, alpha subunit p19 (I123a); interleukin 27 (I127); interleukin 4 (I14); interleukin 4 receptor, alpha (Il4ra); interleukin 6 (I16); interleukin 7 (I17); IRF8; itchy, E3 ubiquitin protein ligase (Itch); jagged 2 (Jag2); jumonji domain containing 6 (Jmjd6); JUNB; junction adhesion molecule like 9 (Jam9); K(lysine) acetyltransferase 2A (Kat2a); KDEL (Lys-Asp-Glu-Leu) endoplasmic reticulum protein retention receptor 1 (Kdelr1); KIT proto-oncogene receptor tyrosine kinase (Kit); LAG-3; LAIR-1 (CD305); LDHA; lectin, galactose binding, soluble 1 (Lgals1); lectin, galactose binding, soluble 3 (Lgals3); lectin, galactose binding, soluble 8 (Lgals8); lectin, galactose binding, soluble 9 (Lgals9); leptin (Lep); leptin receptor (Lepr); leucine rich repeat containing 32 (Lrrc32); leukocyte immunoglobulin-like receptor, subfamily B, member 4A (Lilrb4a); LFNG O-fucosylpeptide 3-beta-N-acetylglucosaminyltransferase (Lfng); LIF; ligase IV, DNA, ATP-dependent (Lig4); LIM domain only 1 (Lmo1); limb region 1 like (Lmbrl); linker for activation of T cells (Lat); lymphocyte antigen 9 (Ly9); lymphocyte cytosolic protein 1 (Lcp1); lymphocyte protein tyrosine kinase (Lck); lymphocyte transmembrane adaptor 1 (Lax1); lymphocyte-activation gene 3 (Lag3); lymphoid enhancer binding factor 1 (Lef1); LYN; lysyl oxidase-like 3 (Loxl3); MAD1 mitotic arrest deficient 1-like 1 (Mad1l1); MALT1 paracaspase (Malt1); MAP4K4; MAPK14; MCJ; mechanistic target of rapamycin kinase (Mtor); MEF2D; Methylation-Controlled J Protein (MCJ); methyltransferase like 3 (Mettl3); MGAT5; MHC I like leukocyte 2 (Mill2); midkine (Mdk); mitogen-activated protein kinase 8 interacting protein 1 (Mapk8ip10); moesin (Msn); myelin protein zero-like 2 (Mpzl2); myeloblastosis oncogene (Myb); myosin, heavy polypeptide 9, non-muscle (Myh9); Nedd4 family interacting protein 1 (Ndfip1); neural precursor cell expressed, developmentally down-regulated 4 (Nedd4); NFATcT; NFATC2; NFATC4; NFKB activating protein (Nkap); nicastrin (Ncstn); NK2 homeobox 3 (Nkx2-3); NLR family, CARD domain containing 3 (Nlrc3); NLR family, pyrin domain containing 3 (Nlrp3); non-catalytic region of tyrosine kinase adaptor protein 1 (Nck1); non-catalytic region of tyrosine kinase adaptor protein 2 (Nck2); non-homologous end joining factor 1 (Nhej1); non-SMC condensin II complex, subunit H2 (Ncaph2); Notch-regulated ankyrin repeat protein (Nrarp); NT5E (CD73); nuclear factor of activated T cells, cytoplasmic, calcineurin dependent (Nfatc3); nuclear factor of kappa light polypeptide gene enhancer in B cells inhibitor, delta (Nfkbid); nuclear receptor co-repressor 1 (Ncor1); Nuclear Receptor Subfamily 4 Group A Member 1 (NR4A1); Nuclear Receptor Subfamily 4 Group A Member 2 (NR4A2); Nuclear Receptor Subfamily 4 Group A Member 3 (NR4A3); ODC1; OTU domain containing 5 (Otud5); OTULINL (FAM105A); paired box 1 (Pax1); PDCD1 (PD1; PD-1); PDIA3; pellino 1 (Peli1); peroxiredoxin 2 (Prdx2); PHD1 (EGLN2); PHD2 (EGLN1); PHD3 (EGLN3); phosphodiesterase 5A, cGMP-specific (Pde5a); phosphoinositide-3-kinase regulatory subunit (Pik3r6); phospholipase A2, group IIA (Pla2g2a); phospholipase A2, group IID (Pla2g2d); phospholipase A2, group IIE (Pla2g2e); phosphoprotein associated with glycosphingolipid microdomains 1 (Pag1); PIK3CD; PIKFYVE; POZ (BTB) and AT hook containing zinc finger 1 (Patz1); PPARa; PPARd; PR domain containing 1, with ZNF domain (Prdm1); presenilin 1 (Psen1); presenilin 2 (Psen2); PRKACA; PRKC, apoptosis, WT1, regulator (Pawr); programmed cell death 1 ligand 2 (Pdcd1lg2); prosaposin (Psap); prostaglandin E receptor 4 (subtype EP4) (Ptger4); protein kinase C, theta 2 (Prkcq); protein kinase C, zeta (Prkcz); protein kinase, cAMP dependent regulatory, type I, alpha (Prkar1a); protein kinase, DNA activated, catalytic polypeptide (Prkdc); protein phosphatase 3, catalytic subunit, beta isoform (Ppp3cb); protein tyrosine phosphatase, non-receptor type 2 (Ptpn2); protein tyrosine phosphatase, non-receptor type 22 (lymphoid) (Ptpn22); protein tyrosine phosphatase, non-receptor type 6 (Ptpn6); protein tyrosine phosphatase, receptor type, C (Ptprc); PTEN; PTPN11; purine-nucleoside phosphorylase (Pnp); purinergic receptor P2X, ligand-gated ion channel, 7 (P2rx7); PVR Related Immunoglobulin Domain Containing (PVRIG; CD112R); PYD and CARD domain containing 7 (Pycard); RAB27A, member RAS oncogene family (Rab27a); RAB29, member RAS oncogene family (Rab29); radical S-adenosyl methionine domain containing 2 (Rsad2); RAR-related orphan receptor alpha (Rora); RAR-related orphan receptor gamma (Ror); RAS guanyl releasing protein 1 (Rasgrpl); ras homolog family member A (Rhoa); ras homolog family member H (Rhoh); RAS protein activator like 3 (Rasal3); RASA2; receptor (TNFRSF)-interacting serine-threonine kinase 2 (Ripk2); recombination activating gene 1 (Rag1); recombination activating gene 2 (Rag2); Regulatory Factor X Associated Ankyrin Containing Protein (RFXANK); RHO family interacting cell polarization regulator 2 (Ripor2); ribosomal protein L22 (Rpl 22); ribosomal protein S6 (Rps6); RING CCCH (C3H) domains 1 (Rc3h1); ring finger and CCCH-type zinc finger domains 2 (Rc3h2); RNF2; runt related transcription factor 1 (Runx1); runt related transcription factor 2 (Runx2); SAM and SH3 domain containing 3 (Sash3); schlafen 1; Selectin P Ligand/P-Selectin Glycoprotein Ligand-1 (SELPG/PSGL1) polypeptide; selenoprotein K (Selenok); sema domain immunoglobulin domain (Ig), transmembrane domain (TM) and short cytoplasmic domain, (semaphorin) 4A (Sema4a); serine/threonine kinase 11 (Stk11); SH3 domain containing ring finger 1 (Sh3rf1); SHP1; sialophorin (Spn); SIGLEC15; signal transducer and activator of transcription 3 (Stat3); signal transducer and activator of transcription 5A (Stat5A); signal transducer and activator of transcription 5B (Stat5B); signal-regulatory protein alpha (Sirpa); Signal-regulatory protein beta 1A (Sirpb1a); Signal-regulatory protein beta 1C (Sirpb1c); SLA; SLAM family member 6 (Slamf6); SLAMF7; SMAD family member 3 (Smad3); SMAD family member 7 (Smad7); SMARCA4; solute carrier family 11 (proton-coupled divalent metal ion transporters), member 1 (Slc11a1); solute carrier family 4 (anion exchanger), member 1; solute carrier family 46, member 2 (Slc46a2); sonic hedgehog (Shh); SOS Ras/Rac guanine nucleotide exchange factor 1 (Sos1); SOS Ras/Rac guanine nucleotide exchange factor 2 (Sos2); special AT-rich sequence binding protein 1 (Satb1); spleen tyrosine kinase (Syk); Sprouty RTK Signaling Antagonist 1 (Spry1); Sprouty RTK Signaling Antagonist 2 (Spry2); squamous cell carcinoma antigen recognized by T cells (Sart1); src homology 2 domain-containing transforming protein B (Shb); Src-like-adaptor 2 (Sla2); SRY (sex determining region Y)-box 4 (Sox4); STK4; suppression inducing transmembrane adaptor 1 (Sit1); suppressor of cytokine signaling 1 (Socs1); suppressor of cytokine signaling 5 (Socs5); suppressor of cytokine signaling 6 (Socs6); surfactant associated protein D (Sftpd); SUV39; syndecan 4 (Sdc4); syntaxin 11 (Stxl 1); T Cell Immunoglobulin Mucin 3 (Tim-3); T cell immunoreceptor with Ig and ITIM domains (Tigit); T cell receptor alpha joining 18 (Traj18); T Cell Receptor Beta Constant 1 (TRBC1); T Cell Receptor Beta Constant 2 (TRBC2); T cell, immune regulator 1, ATPase, H+ transporting, lysosomal V0 protein A3 (Tcirg1); T cell-interacting, activating receptor on myeloid cells 1 (Tarm1); T-box 21 (Tbx21); TCR; TCR alpha; TCR beta; TCR complex gene sequence; Tet Methylcytosine Dioxygenase 2 (TET2); TGFbRII; TGFbRII (TGFBR2); three prime repair exonuclease 1 (Trex1); thymocyte selection associated (Themis); thymus cell antigen 1, theta (Thy 1); TMEM222; TNF receptor-associated factor 6 (Traf6); TNFAIP3; TNFRSF10B; TNFRSF8 (CD30); TOX; TOX2; TRAC; transformation related protein 53 (Trp53); Transforming Growth Factor Beta Receptor II (TGFbRII); transforming growth factor, beta receptor II (Tgfbr2); transmembrane 131 like (Tmeml311); transmembrane protein 98 (Tmem98); triggering receptor expressed on myeloid cells-like 2 (Treml2); TSC complex subunit 1 (Tsc1); tumor necrosis factor (ligand) superfamily, member 11 (Tnfsf11); tumor necrosis factor (ligand) superfamily, member 13b (Tnfsf13b); tumor necrosis factor (ligand) superfamily, member 4 (Tnfsf4); tumor necrosis factor (ligand) superfamily, member 9 (Tnfsf9); tumor necrosis factor receptor superfamily, member 13c (Tnfrsf13c); tumor necrosis factor receptor superfamily, member 4 (Tnfrsf4); tumor necrosis factor, alpha-induced protein 8-like 2 (Tnfalp812); twisted gastrulation BMP signaling modulator 1 (Twsg1); UBASH3A; vanin 1 (Vnn1); vascular cell adhesion molecule 1 (Vcam1); VHL; v-maf musculoaponeurotic fibrosarcoma oncogene family, protein B (avian) (Mafb); V-set and immunoglobulin domain containing 4 (Vsig4); V-Set Immunoregulatory Receptor (VISTA); WD repeat and FYVE domain containing 4 (Wdfy4); wingless-type MMTV integration site family, member 1 (Wnt1); wingless-type MMTV integration site family, member 4 (Wnt4); WNT signaling pathway regulator (Apc); WW domain containing E3 ubiquitin protein ligase 1 (Wwp1); XBP1; YAP1; ZAP70; ZC3H12A; zfp35; zinc finger and BTB domain containing 1 (Zbtb1); zinc finger and BTB domain containing 7B (Zbtb7B); zinc finger CCCH type containing 12A (Zc3h12a); zinc finger CCCH type containing 12D (Zc3h12d); zinc finger E-box binding homeobox 1 (Zeb1); zinc finger protein 36, C3H type (Zfp36); zinc finger protein 36, C3H type-like 1 (Zfp36L1); zinc finger protein 36, C3H type-like 2 (Zfp36L2); and zinc finger protein 683 (Zfp683).

[0067] In any of the above aspects, or embodiments thereof, the method further involves knocking out expression of HLA-A and HLA-B and does not comprise knocking out expression of B2M. In any of the above aspects, or embodiments thereof, the method further involves knocking out expression of HLA-A and HLA-B and does not comprise knocking out expression of B2M, CITA; NLRC5, TAP1, TAP2, ERp57 (PDIA3), and TAPBP (Tapasin). In any of the above aspects, or embodiments thereof, the method further involves knocking out expression of HLA-A and HLA-B and does not comprise knocking out expression of at least one, at least two, at least three, at least four, at least five, at least six, or all seven of B2M, CITA; NLRC5, TAP1, TAP2, ERp57 (PDIA3), and TAPBP (Tapasin).

[0068] In any of the above aspects, or embodiments thereof, the method further involves knocking out expression of HLA-A and HLA-B and does not comprise reducing (e.g., partially knocking out) expression of B2M. In any of the above aspects, or embodiments thereof, the method further involves knocking out expression of HLA-A and HLA-B and does not comprise reducing expression of B2M, CITA; NLRC5, TAP1, TAP2, ERp57 (PDIA3), and TAPBP (Tapasin). In any of the above aspects, or embodiments thereof, the method further involves knocking out expression of HLA-A and HLA-B and does not comprise reducing expression of at least one, at least two, at least three, at least four, at least five, at least six, or all seven of B2M, CITA; NLRC5, TAP1, TAP2, ERp57 (PDIA3), and TAPBP (Tapasin).

[0069] In any of the above aspects, or embodiments thereof, the method further involves knocking out expression of HLA-A and HLA-B and comprises reducing (e.g., partially knocking out) expression (e.g., by at least 25%, at least 50%, at least 75%, or more) of B2M. In any of the above aspects, or embodiments thereof, the method further involves knocking out expression of HLA-A and HLA-B and comprises reducing expression (e.g., by at least 25%, at least 50%, at least 75%, or more) of one or more of B2M, CITA; NLRC5, TAP1, TAP2, ERp57 (PDIA3), and TAPBP (Tapasin). In any of the above aspects, or embodiments thereof, the method further involves knocking out expression of HLA-A and HLA-B and comprises reducing expression (e.g., by at least 25%, at least 50%, at least 75%, or more) of at least one, at least two, at least three, at least four, at least five, at least six, or all seven of B2M, CITA; NLRC5, TAP1, TAP2, ERp57 (PDIA3), and TAPBP (Tapasin).

[0070] In any of the above aspects, or embodiments thereof, the method further involves contacting the cell with one or more guide RNAs that target the base editor to effect an alteration in a nucleic acid molecule, where the nucleic acid molecule encodes a polypeptide and/or contains a regulatory element associated with expression thereof. The polypeptide is selected from one or more of CD155, Nectin-2, CD48, MICA, MICB, and ULBP.

### Definitions

[0071] Unless defined otherwise, all technical and scientific terms used herein have the meaning commonly understood by a person skilled in the art to which this invention belongs. The following references provide one of skill with a general definition of many of the terms used in this disclosure: Singleton et al., Dictionary of Microbiology and Molecular Biology (2nd ed. 1994); The Cambridge Dictionary of Science and Technology (Walker ed., 1988); The Glossary of Genetics, 5th Ed., R. Rieger et al. (eds.), Springer Verlag (1991); and Hale & Marham, The Harper Collins Dictionary of Biology (1991). As used herein, the following terms have the meanings ascribed to them below, unless specified otherwise.

[0072] By “cluster of differentiation 155 (CD155) polypeptide,” also termed the Poliovirus Receptor (PVR), is meant a protein having at least about 85% amino acid sequence identity to GenBank Accession No. AAF69803.1, which is provided below, or a fragment thereof having cell adhesion and/or immunomodulatory activity.

(SEQ ID NO: 1020)
>AAF69803.1 poliovirus receptor [Homo sapiens]
MARAMAAAWPLLLVALLVLSWPPPGTGDVVVQAPTQVPGFLGDSVTLPCY
LQVPNMEVTHVSQLTWARHGESGSMAVFHQTQGPSYSESKRLEFVAARLG
AELRNASLRMFGLRVEDEGNYTCLFVTFPQGSRSVDIWLRVLAKPQNTAE
VQKVQLTGEPVPMARCVSTGGRPPAQITWHSDLGGMPNTSQVPGFLSGTV
TVTSLWILVPSSQVDGKNVTCKVEHESFEKPQLLTVNLTVYYPPEVSISG
YDNNWYLGQNEATLTCDARSNPEPTGYNWSTTMGPLPPFAVAQGAQLLIR
PVDKPINTTLICNVTNALGARQAELTVQVKEGPPSEHSGISRNAIIFLVL
GILVFLILLGIGIYFYWSKCSREVLWHCHLCPSSTEHASASANGHVSYSA
VSRENSSSQDPQTEGTR

[0073] By “cluster of differentiation 155 (CD155) polynucleotide” is meant a nucleic acid molecule encoding an CD155 polypeptide, as well as the introns, exons, 3′ untranslated regions, 5′ untranslated regions, and regulatory sequences associated with its expression, or fragments thereof. An exemplary CD155 polynucleotide sequence is provided at Genbank Accession No. AC068948.1, which is provided below.

>AC068948.1:12735-12813, 15833-16180, 18419-18715,
22507-22624, 26368-26516, 27348-27506, 29897-29928,
30345-30416 Homo sapiens chromosome 19, cosmid R28371
(LLNL-R_244D7), complete sequence
(SEQ ID NO: 1021)
ATGGCCCGAGCCATGGCCGCCGCGTGGCCGCTGCTGCTGGTGGCGCTACTGGTGCTGTCCTGGC
CACCCCCAGGAACCGGGGACGTCGTCGTGCAGGCGCCCACCCAGGTGCCCGGCTTCTTGGGCGA
CTCCGTGACGCTGCCCTGCTACCTACAGGTGCCCAACATGGAGGTGACGCATGTGTCACAGCTG
ACTTGGGCGCGGCATGGTGAATCTGGCAGCATGGCCGTCTTCCACCAAACGCAGGGCCCCAGCT
ATTCGGAGTCCAAACGGCTGGAATTCGTGGCAGCCAGACTGGGCGCGGAGCTGCGGAATGCCTC
GCTGAGGATGTTCGGGTTGCGCGTAGAGGATGAAGGCAACTACACCTGCCTGTTCGTCACGTTC
CCGCAGGGCAGCAGGAGCGTGGATATCTGGCTCCGAGTGCTTGCCAAGCCCCAGAACACAGCTG
AGGTTCAGAAGGTCCAGCTCACTGGAGAGCCAGTGCCCATGGCCCGCTGCGTCTCCACAGGGGG
TCGCCCGCCAGCCCAAATCACCTGGCACTCAGACCTGGGCGGGATGCCCAATACGAGCCAGGTG
CCAGGGTTCCTGTCTGGCACAGTCACTGTCACCAGCCTCTGGATATTGGTGCCCTCAAGCCAGG
TGGACGGCAAGAATGTGACCTGCAAGGTGGAGCACGAGAGCTTTGAGAAGCCTCAGCTGCTGAC
TGTGAACCTCACCGTGTACTACCCCCCAGAGGTATCCATCTCTGGCTATGATAACAACTGGTAC
CTTGGCCAGAATGAGGCCACCCTGACCTGCGATGCTCGCAGCAACCCAGAGCCCACAGGCTATA
ATTGGAGCACGACCATGGGTCCCCTGCCACCCTTTGCTGTGGCCCAGGGCGCCCAGCTCCTGAT
CCGTCCTGTGGACAAACCAATCAACACAACTTTAATCTGCAACGTCACCAATGCCCTAGGAGCT
CGCCAGGCAGAACTGACCGTCCAGGTCAAAGAGGGACCTCCCAGTGAGCACTCAGGCATATCCC
GTAACGCCATCATCTTCCTGGTTCTGGGAATCCTGGTTTTTCTGATCCTGCTGGGGATCGGGAT
TTATTTCTATTGGTCCAAATGTTCCCGTGAGGTCCTTTGGCACTGTCATCTGTGTCCCTCGAGT
ACAGAGCATGCCAGCGCCTCAGCTAATGGGCATGTCTCCTATTCAGCTGTGAGCAGAGAGAACA
GCTCTTCCCAGGATCCACAGACAGAGGGCACAAGGTGA.
The CD155 gene corresponds to ENSG00000073008.15.

[0074] By “cluster of differentiation 48 (CD48) polypeptide” is meant a protein having at least about 85% amino acid sequence identity to any one of GenBank Accession Nos. NP_001242959, NP_001769, and AAA62834.1, which is provided below, or a fragment thereof having immunomodulatory activity.

>NP_001242959.1 CD48 antigen isoform 2 precursor [Homo sapiens]
(SEQ ID NO: 1046)
MCSRGWDSCLALELLLLPLSLLVTSQGHLVHMTVVSGSNVTLNISESLPENYKQLTWFYTFDQ
KIVEWDSRKSKYFESKFKGRVRLDPQSGALYISKVQKEDNSTYIMRVLKKTGNEQEWKIKLQVL
DPVPKPVIKIEKIEDMDDNCYLKLSCVIPGESVNYTWYGDKRPFPKELQNSVLETTLMPHNYSR
CYTCQVSNSVSSKNGTVCLSPPCTLGKKDPWELRGAQGNWSCFEQRKAGGPIQPPCTVWW.
>NP_001769.2 CD48 antigen isoform 1 precursor [Homo sapiens]
(SEQ ID NO: 0147)
MCSRGWDSCLALELLLLPLSLLVTSIQGHLVHMTVVSGSNVTLNISESLPENYKQLTWFYTFDQ
KIVEWDSRKSKYFESKFKGRVRLDPQSGALYISKVQKEDNSTYIMRVLKKTGNEQEWKI KLQVL
DPVPKPVIKIEKIEDMDDNCYLKLSCVIPGESVNYTWYGDKRPFPKELQNSVLETTLMPHNYSR
CYTCQVSNSVSSKNGTVCLSPPCTLARSFGVEWIASWLVVTVPTILGLLLT.
>AAA62834.1 pan-leukocyte antigen [Homo sapiens]
(SEQ ID NO: 1022)
[sequence omitted]

[0075] By “cluster of differentiation 48 (CD48) polynucleotide” is meant a nucleic acid molecule encoding an CD48 polypeptide, as well as the introns, exons, 3′ untranslated regions, 5′ untranslated regions, and regulatory sequences associated with its expression, or fragments thereof. One exemplary CD48 polynucleotide sequence is provided at Genbank Accession No. M59904.1, which is provided below.

>M59904.1:18-749 Human pan-leukocyte antigen (CD48) mRNA,
complete cds
(SEQ ID NO: 1023)
ATGTGGTCCAGAGGTTGGGATTCGTGTCTGGCTCTGGAATTGCTACTGCTGCCTCTGTCACTCC
TGGTGACCAGCATTCAAGGTCACTTGGTACATATGACCGTGGTCTCCGGCAGCAACGTGACTCT
GAACATCTCTGAGAGCCTGCCTGAGAACTACAAACAACTAACCTGGTTTTATACTTTCGACCAG
AAGATTGTAGAATGGGATTCCAGAAAATCTAAGTACTTTGAATCCAAATTTAAAGGCAGGGTCA
GACTTGATCCTCAGAGTGGCGCACTGTACATCTCTAAGGTCCAGAAAGAGGACAACAGCACCTA
CATCATGAGGGTGTTGAAAAAGACTGGGAATGAGCAAGAATGGAAGATCAAGCTGCAAGTGCTT
GACCCTGTACCCAAGCCTGTCATCAAAATTGAGAAGATAGAAGACATGGATGACAACTGTTATC
TGAAACTGTCATGTGTGATACCTGGCGAGTCTGTAAACTACACCTGGTATGGGGACAAAAGGCC
CTTCCCAAAGGAGCTCCAGAACAGTGTGCTTGAAACCACCCTTATGCCACATAATTACTCCAGG
TGTTATACTTGCCAAGTCAGCAATTCTGTGAGCAGCAAGAATGGCACCGTCTGCCTCAGTCCAC
CCTGTACCCTGGCCCGGTCCTTTGGAGTAGAATGGATTGCAAGTTGGCTAGTGGTCACGGTGCC
CACCATTCTTGGCCTGTTACTTACCTGA

[0076] Other exemplary sequences are provided below:

>NM_001256030.2 Homo sapiens CD48 molecule (CD48),
transcript variant 2, mRNA
(SEQ ID NO: 1048)
CTTTTTCTAGCCAGGCTCTCAACTGTCTCCTGCGTTGCTGGGAAGTTCTGGAAGGAAGCATGTG
CTCCAGAGGTTGGGATTCGTGTCTGGCTCTGGAATTGCTACTGCTGCCTCTGTCACTCCTGGTG
ACCAGCATTCAAGGTCACTTGGTACATATGACCGTGGTCTCCGGCAGCAACGTGACTCTGAACA
TCTCTGAGAGCCTGCCTGAGAACTACAAACAACTAACCTGGTTTTATACTTTCGACCAGAAGAT
TGTAGAATGGGATTCCAGAAAATCTAAGTACTTTGAATCCAAATTTAAAGGCAGGGTCAGACTT
GATCCTCAGAGTGGCGCACTGTACATCTCTAAGGTCCAGAAAGAGGACAACAGCACCTACATCA
TGAGGGTGTTGAAAAAGACTGGGAATGAGCAAGAATGGAAGATCAAGCTGCAAGTGCTTGACCC
TGTACCCAAGCCTGTCATCAAAATTGAGAAGATAGAAGACATGGATGACAACTGTTATCTGAAA
CTGTCATGTGTGATACCTGGCGAGTCTGTAAACTACACCTGGTATGGGGACAAAAGGCCCTTCC
CAAAGGAGCTCCAGAACAGTGTGCTTGAAACCACCCTTATGCCACATAATTACTCCAGGTGTTA
TACTTGCCAAGTCAGCAATTCTGTGAGCAGCAAGAATGGCACGGTCTGCCTCAGTCCACCCTGT
ACCCTGGGTAAGAAGGATCCCTGGGAGCTGAGGGGGGCACAGGGTAACTGGAGTTGTTTTGAAC
AAAGAAAGGCTGGGGGTCCTATTCAGCCTCCTTGCACAGTGTGGTGGTGAATCCCTAAGGTGTC
TGGGAGAGCTGGGAGACGTGGGTTCTGCCACCAGCTCTACCACCACCTCCCAGCCAGCTTACCT
CAACTTCGTGGGGGCTCAGTGTTCTCACCTGCAAAGGACGTTTGGGAGAGATCTCTGATACTCC
TCTTCCCTCTCCCGCTCTAACAAAGCATAGTCCTAACATCTGAGGCCAGGGTCATCATAGAGTA
GACTGAAACATCAGGGTGAGCAGGGAGAAGGAAGGGCAAGTGGGCGAGCAGCTGTCTAGAGGGG
CTTCATTAGACAGCCGAAGTCAGCCAAGGAAAGAGGGACCGAGGTCATTAGACCGCCAAAGTCA
GCCAGGGAAAGAGGGACTGAGGAGACGGGCCTGAGAGAGGCCGTCGAGGAGGCGTGAGAGCCTG
AGCCTCAGGCGAAGCTTCTCCTCCCCAGCCTGATGTTCCTAGATGAACTTAGGAAGCCAGATTC
CCCTGTCTCCTGGGAGGATCCACTCATGAGTGTCACACCTGGCTCTAGATCAGGCCTACACTGG
TGCTAGCATGGGACAGCTAAGGCCATGGGTTTTAGAGTCAGTCATACCTGGGGTCACTTCTAGG
ACTGTCACTTACTAGCTAAACAAGTTACTTAGCTTCCCCAAGTCATGTTCTTCCTAAATAAAGG
ACAAAATAACAGTT.
>NM_001778.4 Homo sapiens CD48 molecule (CD48),
transcript variant 1, mRNA
(SEQ ID NO: 1049)
CTTTTTCTAGCCAGGCTCTCAACTGTCTCCTGCGTTGCTGGGAAGTTCTGGAAGGAAGCATGTG
CTCCAGAGGTTGGGATTCGTGTCTGGCTCTGGAATTGCTACTGCTGCCTCTGTCACTCCTGGTG
ACCAGCATTCAAGGTCACTTGGTACATATGACCGTGGTCTCCGGCAGCAACGTGACTCTGAACA
TCTCTGAGAGCCTGCCTGAGAACTACAAACAACTAACCTGGTTTTATACTTTCGACCAGAAGAT
TGTAGAATGGGATTCCAGAAAATCTAAGTACTTTGAATCCAAATTTAAAGGCAGGGTCAGACTT
GATCCTCAGAGTGGCGCACTGTACATCTCTAAGGTCCAGAAAGAGGACAACAGCACCTACATCA
TGAGGGTGTTGAAAAAGACTGGGAATGAGCAAGAATGGAAGATCAAGCTGCAAGTGCTTGACCC
TGTACCCAAGCCTGTCATCAAAATTGAGAAGATAGAAGACATGGATGACAACTGTTATCTGAAA
CTGTCATGTGTGATACCTGGCGAGTCTGTAAACTACACCTGGTATGGGGACAAAAGGCCCTTCC
CAAAGGAGCTCCAGAACAGTGTGCTTGAAACCACCCTTATGCCACATAATTACTCCAGGTGTTA
TACTTGCCAAGTCAGCAATTCTGTGAGCAGCAAGAATGGCACGGTCTGCCTCAGTCCACCCTGT
ACCCTGGCCCGGTCCTTTGGAGTAGAATGGATTGCAAGTTGGCTAGTGGTCACGGTGCCCACCA
TTCTTGGCCTGTTACTTACCTGAGATGAGCTCTTTTAACTCAAGCGAAACTTCAAGGCCAGAAG
ATCTTGCCTGTTGGTGATCATGCTCCTCACCAGGACAGAGACTGTATAGGCTGACCAGAAGCAT
GCTGCTGAATTATCAACGAGGATTTTCAAGTTAACTTTTAAATACTGGTTATTATTTAATTTTA
TATCCCTTTGTTGTTTTCTAGTACACAGAGATATAGAGATACACATGCTTTTTTCCCACCCAAA
ATTGTGACAACATTATGTGAATGTTTTATTATTTTTTAAAATAAACATTTGATATAATTGTCAA
TTAACTGAA.
The gene for CD48 corresponds to Ensemble Accession No.
ENSG00000117091.

[0077] By “major histocompatibility complex, class I, A (HLA-A) polypeptide” is meant a protein having at least about 60%, 70%, or 85% amino acid sequence identity to GenBank Accession No. BAA07530.1, which is provided below, or a fragment thereof having antigen presenting activity.

>BAA07530.1 HLA-A [Homo sapiens]
(SEQ ID NO: 1024)
[sequence omitted]

[0078] By “major histocompatibility complex, class I, A (HLA-A) polynucleotide” is meant a nucleic acid molecule encoding an HLA-A polypeptide, as well as the introns, exons, 3′ untranslated regions, 5′ untranslated regions, and regulatory sequences associated with its expression, or fragments thereof. An exemplary HLA-A polynucleotide sequence is provided at Genbank Accession No. D38525.1, which is provided below.

>D38525.1:1-843 Homo sapiens HLA-A mRNA, complete cds, HLA-A null
allele HLA-A*0215N
(SEQ ID NO: 1025)
ATGGCCGTCATGGCGCCCCGAACCCTCGTCCTGCTACTCTCGGGGGCTCTGGCCCTGACCCAGA
CCTGGGCGGGCTCTCACTCCATGAGGTATTTCTTCACATCCGTGTCCCGGCCCGGCCGCGGGGA
GCCCCGCTTCATCGCAGTGGGCTACGTGGACGACACGCAGTTCGTGCGGTTCGACAGCGACGCC
GCGAGCCAGAGGATGGAGCCGCGGGCGCCGTGGATAGAGCAGGAGGGTCCGGAGTATTGGGACG
GGGAGACACGGAAAGTGAAGGCCCACTCACAGACTCACCGAGTGGACCTGGGGACCCTGCGCGG
CTACTACAACCAGAGCGAGGCCGGTTCTCACACCGTCCAGAGGATGTGTGGCTGCGACGTGGGG
TCGGACTGGCGCTTCCTCCGCGGGTACCACCAGTACGCCTACGACGGCAAGGATTACATCGCCC
TGAAAGAGGACCTGCGCTCTTGGACCGCGGCGGACATGGCAGCTCAGACCACCAAGCACAAGTG
GGAGGCGGCCCATGTGGCGGAGCAGTTGAGAGCCTACCTGGAGGGCACGTGCGTGGAGTGGCTC
CGCAGATACCTGGAGAACGGGAAGGAGACGCTGCAGCGCACGGACGCCCCCAAAACGCATATGA
CTCACCACGCTGTCTCTGACCATGAAGCCACCCTGAGGTGCTGGGCCCTGAGCTTCTACCCTGC
GGAGATCACACTGACCTGGCAGCGGGATGGGGAGGACCAGACCCAGGACACGGAGCTCGTGGAG
ACCAGGCCTGCAGGGGATGGAACCTTCCAGAAGTGGGCGGCTGTGGTGGTGCCTTCTGGACAGG
AGCAGAGATAA.
The HLA-A gene corresponds to Ensemble ENSG00000206503.

[0079] By “major histocompatibility complex, class I, B (HLA-B) polypeptide” is meant a protein having at least about 85% amino acid sequence identity to GenBank Accession No. CAD30340.1, which is provided below, or a fragment thereof having antigen presenting activity.

>CAD30340.1 HLA-B [Homo sapiens]
(SEQ ID NO: 1026)
[sequence omitted]

[0080] By “major histocompatibility complex, class I, B (HLA-B) polynucleotide” is meant a nucleic acid molecule encoding an HLA-B polypeptide, as well as the introns, exons, 3′ untranslated regions, 5′ untranslated regions, and regulatory sequences associated with its expression, or fragments thereof. An exemplary HLA-B polynucleotide sequence is provided at Genbank Accession No. AJ458992.1, which is provided below.

>AJ458992.1:302-374, 503-772 ,1023-1298, 1872-2147, 2252-2368,
2810-2842, 2949-2992 Homo sapiens HLA-B gene for MHC class I
antigen, HLA-B*4501 allele, exons 1-7
(SEQ ID NO: 1027)
ATGCGGGTCACGGCACCCCGAACCGTCCTCCTGCTGCTCTCGGCGGCCCTGGCCCTGACCGAGA
CCTGGGCCGGCTCCCACTCCATGAGGTATTTCCACACCGCCATGTCCCGGCCCGGCCGCGGGGA
GCCCCGCTTCATCACCGTGGGCTACGTGGACGACACGCTGTTCGTGAGGTTCGACAGCGACGCC
ACGAGTCCGAGGAAGGAGCCGCGGGCGCCATGGATAGAGCAGGAGGGGCCGGAGTATTGGGACC
GGGAGACACAGATCTCCAAGACCAACACACAGACTTACCGAGAGAGCCTGCGGAACCTGCGCGG
CTACTACAACCAGAGCGAGGCCGGGTCTCACACTTGGCAGAGGATGTATGGCTGCGACCTGGGG
CCCGACGGGCGCCTCCTCCGCGGGTATAACCAGTTAGCCTACGACGGCAAGGATTACATCGCCC
TGAACGAGGACCTGAGCTCCTGGACCGCGGCGGACACCGCGGCTCAGATCACCCAGCGCAAGTG
GGAGGCGGCCCGTGTGGCGGAGCAGGACAGAGCCTACCTGGAGGGCCTGTGCGTGGAGTCGCTC
CGCAGATACCTGGAGAACGGGAAGGAGACGCTGCAGCGCGCGGACCCCCCAAAGACACATGTGA
CCCACCACCCCATCTCTGACCATGAGGCCACCCTGAGGTGCTGGGCCCTGGGCTTCTACCCTGC
GGAGATCACACTGACCTGGCAGCGGGATGGCGAGGACCAAACTCAGGACACCGAGCTTGTGGAG
ACCAGACCAGCAGGAGATAGAACCTTCCAGAAGTGGGCAGCTGTGGTGGTGCCTTCTGGAGAAG
AGCAGAGATACACATGCCATGTACAGCATGAGGGGCTGCCGAAGCCCCTCACCCTGAGATGGGA
GCCATCTTCCCAGTCCACCATCCCCATCGTGGGCATTGTTGCTGGCCTGGCTGTCCTAGCAGTT
GTGGTCATCGGAGCTGTGGTCGCTACTGTGATGTGTAGGAGGAAGAGCTCAGGTGGAAAAGGAG
GGAGCTACTCTCAGGCTGCGTCCAGCGACAGTGCCCAGGGCTCTGATGTGTCTCTCACAGCTTG
A.

[0081] By “major histocompatibility complex, class I, C (HLA-C) polypeptide” is meant a protein having at least about 85% amino acid sequence identity to GenBank Accession No. BB094058.1, which is provided below, or a fragment thereof having antigen presenting activity.

>BBO94058.1 MHC class I antigen, HLA-C alpha chain [Homo sapiens]
(SEQ ID NO: 1028)
[sequence omitted]

[0082] By “major histocompatibility complex, class I, C (HLA-C) polynucleotide” is meant a nucleic acid molecule encoding an HLA-C polypeptide, as well as the introns, exons, 3′ untranslated regions, 5′ untranslated regions, and regulatory sequences associated with its expression, or fragments thereof. An exemplary HLA-C polynucleotide sequence is provided at Genbank Accession No. LC508210.1, which is provided below.

>LC508210.1:1-73, 204-473, 720-995, 1583-1858, 1980-2099, 2539-
2571, 2679-2726, 2891-2895 Homo sapiens HLA-C gene for MHC class I
antigen, HLA-C alpha chain, complete cds, HLA-C*12:02:02:01 variant
(SEQ ID NO: 1029)
ATGCGGGTCATGGCGCCCCGAACCCTCATCCTGCTGCTCTCGGGAGCCCTGGCCCTGACCGAGA
CCTGGGCCTGCTCCCACTCCATGAGGTATTTCTACACCGCCGTGTCCCGGCCCGGCCGCGGAGA
GCCCCGCTTCATCGCAGTGGGCTACGTGGACGACACGCAGTTCGTGCGGTTCGACAGCGACGCC
GCGAGTCCAAGAGGGGAGCCGCGGGCGCCGTGGGTGGAGCAGGAGGGGCCGGAGTATTGGGACC
GGGAGACACAGAAGTACAAGCGCCAGGCACAGGCTGACCGAGTGAGCCTGCGGAACCTGCGCGG
CTACTACAACCAGAGCGAGGCCGGGTCTCACACCCTCCAGAGGATGTACGGCTGCGACCTGGGG
CCCGACGGGCGCCTCCTCCGCGGGTATGACCAGTCCGCCTACGACGGCAAGGATTACATCGCCC
TGAACGAGGACCTGCGCTCCTGGACCGCTGCGGACACGGCGGCTCAGATCACCCAGCGCAAGTG
GGAGGCGGCCCGTGAGGCGGAGCAGTGGAGAGCCTACCTGGAGGGCACGTGCGTGGAGTGGCTC
CGCAGATACCTGGAGAACGGGAAGGAGACGCTGCAGCGCGCGGAACACCCAAAGACACACGTGA
CCCACCATCCCGTCTCTGACCATGAGGCCACCCTGAGGTGCTGGGCCCTGGGCTTCTACCCTGC
GGAGATCACACTGACCTGGCAGCGGGATGGCGAGGACCAAACTCAGGACACCGAGCTTGTGGAG
ACCAGGCCAGCAGGAGATGGAACCTTCCAGAAGTGGGCAGCTGTGGTGGTGCCTTCTGGAGAAG
AGCAGAGATACACGTGCCATGTGCAGCACGAGGGGCTGCCAGAGCCCCTCACCCTGAGATGGGA
GCCATCTTCCCAGCCCACCATCCCCATCATGGGCATCGTTGCTGGCCTGGCTGTCCTGGCTGTC
CTAGCTGTCCTAGGAGCTGTGATGGCTGTTGTGATGTGTAGGAGGAAGAGCTCAGGTGGAAAAG
GAGGGAGCTGCTCTCAGGCTGCGTCCAGCAACAGTGCCCAGGGCTCTGATGAGTCTCTCATCGC
TTGTAAAGCCTGA.

[0083] By “MHC class I polypeptide-related sequence A (MICA) polypeptide” is meant a protein having at least about 60%, 70%, or 85% amino acid sequence identity to GenBank Accession No. AAA21718.1, which is provided below, or a fragment thereof having NKG2D receptor binding activity.

>AAA21718.1 MHC class I-related protein
[Homo sapiens]
(SEQ ID NO: 1030)
MGLGPVFLLLAGIFPFAPPGAAAEPHSLRYNLTVLSWDGSVQSGFLTEVH
LDGQPFLRCDRQKCRAKPQGQWAEDVLGNKTWDRETRDLTGNGKDLRMTL
AHIKDQKEGLHSLQEIRVCEIHEDNSTRSSQHFYYDGELFLSQNLETKEW
TMPQSSRAQTLAMNVRNFLKEDAMKTKTHYHAMHADCLQELRRYLKSGVV
LRRTVPPMVNVTRSEASEGNITVTCRASGFYPWNITLSWRQDGVSLSHDT
QQWGDVLPDGNGTYQTWVATRICQGEEQRFTCYMEHSGNHSTHPVPSGKV
LVLQSHWQTFHVSAVAAAAIFVIIIFYVRCCKKKTSAAEGPELVSLQVLD
QHPVGTSDHRDATQLGFQPLMSDLGSTGSTEGA

[0084] By “MHC class I polypeptide-related sequence A (MICA) polynucleotide” is meant a nucleic acid molecule encoding an MICA polypeptide, as well as the introns, exons, 3′ untranslated regions, 5′ untranslated regions, and regulatory sequences associated with its expression, or fragments thereof. An exemplary MICA polynucleotide sequence is provided at Genbank Accession No. L14848.1, which is provided below.

>L14848.1:40-1191 Human MHC class I-related protein mRNA, complete cds
(SEQ ID NO: 1031)
ATGGGGCTGGGCCCGGTCTTCCTGCTTCTGGCTGGCATCTTCCCTTTTGCACCTCCGGGAGCTG
CTGCTGAGCCCCACAGTCTTCGTTATAACCTCACGGTGCTGTCCTGGGATGGATCTGTGCAGTC
AGGGTTTCTCACTGAGGTACATCTGGATGGTCAGCCCTTCCTGCGCTGTGACAGGCAGAAATGC
AGGGCAAAGCCCCAGGGACAGTGGGCAGAAGATGTCCTGGGAAATAAGACATGGGACAGAGAGA
CCAGAGACTTGACAGGGAACGGAAAGGACCTCAGGATGACCCTGGCTCATATCAAGGACCAGAA
AGAAGGCTTGCATTCCCTCCAGGAGATTAGGGTCTGTGAGATCCATGAAGACAACAGCACCAGG
AGCTCCCAGCATTTCTACTACGATGGGGAGCTCTTCCTCTCCCAAAACCTGGAGACTAAGGAAT
GGACAATGCCCCAGTCCTCCAGAGCTCAGACCTTGGCCATGAACGTCAGGAATTTCTTGAAGGA
AGATGCCATGAAGACCAAGACACACTATCACGCTATGCATGCAGACTGCCTGCAGGAACTACGG
CGATATCTAAAATCCGGCGTAGTCCTGAGGAGAACAGTGCCCCCCATGGTGAATGTCACCCGCA
GCGAGGCCTCAGAGGGCAACATTACCGTGACATGCAGGGCTTCTGGCTTCTATCCCTGGAATAT
CACACTGAGCTGGCGTCAGGATGGGGTATCTTTGAGCCACGACACCCAGCAGTGGGGGGATGTC
CTGCCTGATGGGAATGGAACCTACCAGACCTGGGTGGCCACCAGGATTTGCCAAGGAGAGGAGC
AGAGGTTCACCTGCTACATGGAACACAGCGGGAATCACAGCACTCACCCTGTGCCCTCTGGGAA
AGTGCTGGTGCTTCAGAGTCATTGGCAGACATTCCATGTTTCTGCTGTTGCTGCTGCTGCTATT
TTTGTTATTATTATTTTCTATGTCCGTTGTTGTAAGAAGAAAACATCAGCTGCAGAGGGTCCAG
AGCTCGTGAGCCTGCAGGTCCTGGATCAACACCCAGTTGGGACGAGTGACCACAGGGATGCCAC
ACAGCTCGGATTTCAGCCTCTGATGTCAGATCTTGGGTCCACTGGCTCCACTGAGGGCGCCTAG.
The MICA gene corresponds to Ensembl: ENSG00000204520.

[0085] By “MHC class I polypeptide-related sequence B (MICB) polypeptide” is meant a protein having at least about 85% amino acid sequence identity to NCBI Ref. Seq. Accession No. NP_005922.2, which is provided below, or a fragment thereof having NKG2D receptor binding activity.

(SEQ ID NO: 1032)
>NP_005922.2 MHC class I polypeptide-related
sequence B isoform 1 precursor [Homo sapiens]
MGLGRVLLFLAVAFPFAPPAAAAEPHSLRYNLMVLSQDGSVQSGFLAEG
HLDGQPFLRYDRQKRRAKPQGQWAENVLGAKTWDTETEDLTENGQDLRR
TLTHIKDQKGGLHSLQEIRVCEIHEDSSTRGSRHFYYDGELFLSQNLET
QESTVPQSSRAQTLAMNVTNFWKEDAMKTKTHYRAMQADCLQKLQRYLK
SGVAIRRTVPPMVNVTCSEVSEGNITVTCRASSFYPRNITLTWRQDGVS
LSHNTQQWGDVLPDGNGTYQTWVATRIRQGEEQRFTCYMEHSGNHGTHP
VPSGKALVLQSQRTDFPYVSAAMPCFVIIIILCVPCCKKKTSAAEGPEL
VSLQVLDQHPVGTGDHRDAAQLGFQPLMSATGSTGSTEGT

[0086] By “MHC class I polypeptide-related sequence B (MICB) polynucleotide” is meant a nucleic acid molecule encoding an MICB polypeptide, as well as the introns, exons, 3′ untranslated regions, 5′ untranslated regions, and regulatory sequences associated with its expression, or fragments thereof. An exemplary MICB polynucleotide sequence is provided at NCBI Ref. Seq. Accession No. NM_005931.5, which is provided below.

>NM _005931.5:50-1201 Homo sapiens MHC class I polypeptide-related
sequence B (MICB), transcript variant 1, mRNA
(SEQ ID NO: 1033)
ATGGGGCTGGGCCGGGTCCTGCTGTTTCTGGCCGTCGCCTTCCCTTTTGCACCCCCGGCAGCCG
CCGCTGAGCCCCACAGTCTTCGTTACAACCTCATGGTGCTGTCCCAGGATGGATCTGTGCAGTC
AGGGTTTCTCGCTGAGGGACATCTGGATGGTCAGCCCTTCCTGCGCTATGACAGGCAGAAACGC
AGGGCAAAGCCCCAGGGACAGTGGGCAGAAAATGTCCTGGGAGCTAAGACCTGGGACACAGAGA
CCGAGGACTTGACAGAGAATGGGCAAGACCTCAGGAGGACCCTGACTCATATCAAGGACCAGAA
AGGAGGCTTGCATTCCCTCCAGGAGATTAGGGTCTGTGAGATCCATGAAGACAGCAGCACCAGG
GGCTCCCGGCATTTCTACTACGATGGGGAGCTCTTCCTCTCCCAAAACCTGGAGACTCAAGAAT
CGACAGTGCCCCAGTCCTCCAGAGCTCAGACCTTGGCTATGAACGTCACAAATTTCTGGAAGGA
AGATGCCATGAAGACCAAGACACACTATCGCGCTATGCAGGCAGACTGCCTGCAGAAACTACAG
CGATATCTGAAATCCGGGGTGGCCATCAGGAGAACAGTGCCCCCCATGGTGAATGTCACCTGCA
GCGAGGTCTCAGAGGGCAACATCACCGTGACATGCAGGGCTTCCAGCTTCTATCCCCGGAATAT
CACACTGACCTGGCGTCAGGATGGGGTATCTTTGAGCCACAACACCCAGCAGTGGGGGGATGTC
CTGCCTGATGGGAATGGAACCTACCAGACCTGGGTGGCCACCAGGATTCGCCAAGGAGAGGAGC
AGAGGTTCACCTGCTACATGGAACACAGCGGGAATCACGGCACTCACCCTGTGCCCTCTGGGAA
GGCGCTGGTGCTTCAGAGTCAACGGACAGACTTTCCATATGTTTCTGCTGCTATGCCATGTTTT
GTTATTATTATTATTCTCTGTGTCCCTTGTTGCAAGAAGAAAACATCAGCGGCAGAGGGTCCAG
AGCTTGTGAGCCTGCAGGTCCTGGATCAACACCCAGTTGGGACAGGAGACCACAGGGATGCAGC
ACAGCTGGGATTTCAGCCTCTGATGTCAGCTACTGGGTCCACTGGTTCCACTGAGGGCACCTAG.
The MICB gene corresponds to Ensembl: ENSG00000204516.

[0087] By “nectin cell adhesion molecule 2 (Nectin-2) polypeptide” is meant a protein having at least about 85% amino acid sequence identity to NCBI Ref. Seq. Accession No. NP_001036189.1, which is provided below, or a fragment thereof having immunomodulatory and/or cell adhesive activity.

>NP_001036189.1 nectin-2 isoform delta precursor
[Homo sapiens]
(SEQ ID NO: 1034)
MARAAALLPSRSPPTPLLWPLLLLLLLETGAQDVRVQVLPEVRGQLGGTV
ELPCHLLPPVPGLYISLVTWQRPDAPANHQNVAAFHPKMGPSFPSPKPGS
ERLSFVSAKQSTGQDTEAELQDATLALHGLTVEDEGNYTCEFATFPKGSV
RGMTWLRVIAKPKNQAEAQKVTFSQDPTTVALCISKEGRPPARISWLSSL
DWEAKETQVSGTLAGTVTVTSRFTLVPSGRADGVTVTCKVEHESFEEPAL
IPVTLSVRYPPEVSISGYDDNWYLGRTDATLSCDVRSNPEPTGYDWSTTS
GTFPTSAVAQGSQLVIHAVDSLFNTTFVCTVTNAVGMGRAEQVIFVRETP
NTAGAGATGGIIGGIIAAIIATAVAATGILICRQQRKEQTLQGAEEDEDL
EGPPSYKPPTPKAKLEAQEMPSQLFTLGASEHSPLKTPYFDAGASCTEQE
MPRYHELPTLEERSGPLHPGATSLGSPIPVPPGPPAVEDVSLDLEDEEGE
EEEEYLDKINPIYDALSYSSPSDSYQGKGFVMSRAMYV

[0088] By “nectin cell adhesion molecule 2 (Nectin-2) polynucleotide” is meant a nucleic acid molecule encoding an Nectin-2 polypeptide, as well as the introns, exons, 3′ untranslated regions, 5′ untranslated regions, and regulatory sequences associated with its expression, or fragments thereof. An exemplary Nectin-2 polynucleotide sequence is provided at NCBI Ref. Seq. Accession No. NP_001036189.1, which is provided below.

>NM_001042724.2:230-1846 Homo sapiens nectin cell adhesion
molecule 2 (NECTIN2), transcript variant delta, mRNA
(SEQ ID NO: 1035)
ATGGCCCGGGCCGCTGCCCTCCTGCCGTCGAGATCGCCGCCGACGCCGCTGCTGTGGCCGCTGC
TGCTGCTGCTGCTCCTGGAAACCGGAGCCCAGGATGTGCGAGTTCAAGTGCTACCCGAGGTGCG
AGGCCAGCTCGGGGGCACCGTGGAGCTGCCGTGCCACCTGCTGCCACCTGTTCCTGGACTGTAC
ATCTCCCTGGTGACCTGGCAGCGCCCAGATGCACCTGCGAACCACCAGAATGTGGCCGCCTTCC
ACCCTAAGATGGGTCCCAGCTTCCCCAGCCCGAAGCCTGGCAGCGAGCGGCTGTCCTTCGTCTC
TGCCAAGCAGAGCACTGGGCAAGACACAGAGGCAGAGCTCCAGGACGCCACGCTGGCCCTCCAC
GGGCTCACGGTGGAGGACGAGGGCAACTACACTTGCGAGTTTGCCACCTTCCCCAAGGGGTCCG
TCCGAGGGATGACCTGGCTCAGAGTCATAGCCAAGCCCAAGAACCAAGCTGAGGCCCAGAAGGT
CACGTTCAGCCAGGACCCTACGACAGTGGCCCTCTGCATCTCCAAAGAGGGCCGCCCACCTGCC
CGGATCTCCTGGCTCTCATCCCTGGACTGGGAAGCCAAAGAGACTCAGGTGTCAGGGACCCTGG
CCGGAACTGTCACTGTCACCAGCCGCTTCACCTTGGTGCCCTCGGGCCGAGCAGATGGTGTCAC
GGTCACCTGCAAAGTGGAGCATGAGAGCTTCGAGGAACCAGCCCTGATACCTGTGACCCTCTCT
GTACGCTACCCTCCTGAAGTGTCCATCTCCGGCTATGATGACAACTGGTACCTCGGCCGTACTG
ATGCCACCCTGAGCTGTGACGTCCGCAGCAACCCAGAGCCCACGGGCTATGACTGGAGCACGAC
CTCAGGCACCTTCCCGACCTCCGCAGTGGCCCAGGGCTCCCAGCTGGTCATCCACGCAGTGGAC
AGTCTGTTCAATACCACCTTCGTCTGCACAGTCACCAATGCCGTGGGCATGGGCCGCGCTGAGC
AGGTCATCTTTGTCCGAGAGACCCCCAACACAGCAGGCGCAGGGGCCACAGGCGGCATCATCGG
GGGCATCATCGCCGCCATCATTGCTACTGCTGTGGCTGCCACGGGCATCCTTATCTGCCGGCAG
CAGCGGAAGGAGCAGACGCTGCAGGGGGCAGAGGAGGACGAAGACCTGGAGGGACCTCCCTCCT
ACAAGCCACCGACCCCAAAAGCGAAGCTGGAGGCACAGGAGATGCCCTCCCAGCTCTTCACTCT
GGGGGCCTCGGAGCACAGCCCACTCAAGACCCCCTACTTTGATGCTGGCGCCTCATGCACTGAG
CAGGAAATGCCTCGATACCATGAGCTGCCCACCTTGGAAGAACGGTCAGGACCCTTGCACCCTG
GAGCCACAAGCCTGGGGTCCCCCATCCCGGTGCCTCCAGGGCCACCTGCTGTGGAAGACGTTTC
CCTGGATCTAGAGGATGAGGAGGGGGAGGAGGAGGAAGAGTATCTGGACAAGATCAACCCCATC
TATGATGCTCTGTCCTATAGCAGCCCCTCTGATTCCTACCAGGGCAAAGGCTTTGTCATGTCCC
GGGCCATGTATGTGTGA
The Nectin-2 gene corresponds to ENSG00000130202.10.

[0089] By “NOD-like receptor (NLR) family, caspase recruitment (CARD) domain containing 5 (class-I transcriptional activator) (NLRC5 (CITA)) polypeptide” is meant a protein having at least about 85% amino acid sequence identity to NCBI Ref. Seq. Accession No. NP_115582.4, which is provided below, or a fragment thereof having immunomodulatory activity.

>NP_115582.4 protein NLRC5 isoform 1 [Homo sapiens]
(SEQ ID NO: 1036)
MDPVGLQLGNKNLWSCLVRLLTKDPEWLNAKMKFFLPNTDLDSRNETLDPEQRVILQLNKLHVQ
GSDTWQSFIHCVCMQLEVPLDLEVLLLSTFGYDDGFTSQLGAEGKSQPESQLHHGLKRPHQSCG
SSPRRKQCKKQQLELAKKYLQLLRTSAQQRYRSQIPGSGQPHAFHQVYVPPILRRATASLDTPE
GAIMGDVKVEDGADVSISDLFNTRVNKGPRVTVLLGKAGMGKTTLAHRLCQKWAEGHLNCFQAL
FLFEFRQLNLITRFLTPSELLFDLYLSPESDHDTVFQYLEKNADQVLLIFDGLDEALQPMGPDG
PGPVLTLFSHLCNGTLLPGCRVMATSRPGKLPACLPAEAAMVHMLGFDGPRVEEYVNHFFSAQP
SREGALVELQTNGRLRSLCAVPALCQVACLCLHHLLPDHAPGQSVALLPNMTQLYMQMVLALSP
PGHLPTSSLLDLGEVALRGLETGKVIFYAKDIAPPLIAFGATHSLLTSFCVCTGPGHQQTGYAF
THLSLQEFLAALHLMASPKVNKDTLTQYVTLHSRWVQRTKARLGLSDHLPTFLAGLASCTCRPF
LSHLAQGNEDCVGAKQAAVVQVLKKLATRKLTGPKVVELCHCVDETQEPELASLTAQSLPYQLP
FHNFPLTCTDLATLTNILEHREAPIHLDFDGCPLEPHCPEALVGCGQIENLSFKSRKCGDAFAE
ALSRSLPTMGRLQMLGLAGSKITARGISHLVKALPLCPQLKEVSFRDNQLSDQVVLNIVEVLPH
LPRLRKLDLSSNSICVSTLLCLARVAVTCPTVRMLQAREADLIFLLSPPTETTAELQRAPDLQE
SDGQRKGAQSRSLTLRLQKCQLQVHDAEALIALLQEGPHLEEVDLSGNQLEDEGCRLMAEAASQ
LHIARKLDLSNNGLSVAGVHCVLRAVSACWTLAELHISLQHKTVIFMFAQEPEEQKGPQERAAF
LDSLMLQMPSELPLSSRRMRLTHCGLQEKHLEQLCKALGGSCHLGHLHLDFSGNALGDEGAARL
AQLLPGLGALQSLNLSENGLSLDAVLGLVRCFSTLQWLFRLDISFESQHILLRGDKTSRDMWAT
GSLPDFPAAAKFLGFRQRCIPRSLCLSECPLEPPSLTRLCATLKDCPGPLELQLSCEFLSDQSL
ETLLDCLPQLPQLSLLQLSQTGLSPKSPFLLANTLSLCPRVKKVDLRSLHHATLHFRSNEEEEG
VCCGRFTGCSLSQEHVESLCWLLSKCKDLSQVDLSANLLGDSGLRCLLECLPQVPISGLLDLSH
NSISQESALYLLETLPSCPRVREASVNLGSEQSFRIHFSREDQAGKTLRLSECSFRPEHVSRLA
TGLSKSLQLTELTLTQCCLGQKQLAILLSLVGRPAGLFSLRVQEPWADRARVLSLLEVCAQASG
SVTEISISETQQQLCVQLEFPRQEENPEAVALRLAHCDLGAHHSLLVGQLMETCARLQQLSLSQ
VNLCEDDDASSLLLQSLLLSLSELKTFRLTSSCVSTEGLAHLASGLGHCHHLEELDLSNNQFDE
EGTKALMRALEGKWMLKRLDLSHLLLNSSTLALLTHRLSQMTCLQSLRLNRNSIGDVGCCHLSE
ALRAATSLEELDLSHNQIGDAGVQHLATILPGLPELRKIDLSGNSISSAGGVQLAESLVLCRRL
EELMLGCNALGDPTALGLAQELPQHLRVLHLPFSHLGPGGALSLAQALDGSPHLEEISLAENNL
AGGVLRFCMELPLLRQIDLVSCKIDNQTAKLLTSSFTSCPALEVILLSWNLLGDEAAAELAQVL
PQMGRLKRVDLEKNQITALGAWLLAEGLAQGSSIQVIRLWNNPIPCDMAQHLKSQEPRLDFAFF
DNQPQAPWGT.

[0090] By “NLR family CARD domain containing 5 (class-I transcriptional activator) (NLRC5 (CITA)) polynucleotide” is meant a nucleic acid molecule encoding an NLRC5 polypeptide, as well as the introns, exons, 3′ untranslated regions, 5′ untranslated regions, and regulatory sequences associated with its expression, or fragments thereof. An exemplary NLRC5 polynucleotide sequence is provided at NCBI Ref. Seq. Accession No. NM_032206.5, which is provided below.

>NM_032206.5:167-5767 Homo sapiens NLR family CARD domain
containing 5 (NLRC5), transcript variant 1, mRNA
(SEQ ID NO: 1037)
ATGGACCCCGTTGGCCTCCAGCTCGGCAACAAGAACCTGTGGAGCTGTCTTGTGAGGCTGCTCA
CCAAAGACCCAGAATGGCTGAACGCCAAGATGAAGTTCTTCCTCCCCAACACGGACCTGGATTC
CAGGAACGAGACCTTGGACCCTGAACAGAGAGTCATCCTGCAACTCAACAAGCTGCATGTCCAG
GGTTCGGACACCTGGCAGTCTTTCATTCATTGTGTGTGCATGCAGCTGGAGGTGCCTCTGGACC
TGGAGGTGCTGCTGCTGAGTACTTTTGGCTATGATGATGGGTTCACCAGCCAGCTGGGAGCTGA
GGGGAAAAGCCAACCTGAATCTCAGCTCCACCATGGCCTGAAGCGCCCACATCAGAGCTGTGGG
TCCTCACCCCGCCGGAAGCAGTGCAAGAAGCAGCAGCTAGAGTTGGCCAAGAAGTACCTGCAGC
TCCTGCGGACCTCTGCCCAGCAGCGCTACAGGAGCCAAATCCCTGGGTCAGGGCAGCCCCACGC
CTTCCACCAGGTCTATGTCCCTCCAATCCTGCGCCGGGCCACAGCATCCTTAGACACTCCGGAG
GGGGCCATTATGGGGGACGTCAAGGTGGAAGATGGTGCTGACGTGAGCATCTCGGACCTCTTCA
ACACCAGGGTTAACAAGGGCCCGAGGGTGACCGTGCTTTTGGGGAAGGCTGGCATGGGCAAGAC
CACGCTGGCCCACCGGCTCTGCCAGAAGTGGGCAGAGGGCCATCTGAACTGTTTCCAGGCCCTG
TTCCTTTTTGAATTCCGCCAGCTCAACTTGATCACGAGGTTCCTGACACCGTCCGAGCTCCTTT
TTGATCTGTACCTGAGCCCTGAATCGGACCACGACACTGTCTTCCAGTACCTGGAGAAGAACGC
TGACCAAGTCCTGCTGATCTTTGATGGGCTAGATGAGGCCCTCCAGCCTATGGGTCCTGATGGC
CCAGGCCCAGTCCTCACCCTTTTCTCCCATCTCTGCAATGGGACCCTCCTGCCTGGCTGCCGGG
TGATGGCTACCTCCCGTCCAGGGAAGCTGCCTGCCTGCCTGCCTGCAGAGGCAGCCATGGTCCA
CATGTTGGGCTTTGATGGGCCACGGGTGGAAGAATATGTGAATCACTTCTTCAGCGCCCAGCCA
TCGCGGGAGGGGGCCCTGGTGGAGTTACAGACAAATGGACGTCTCCGAAGCCTGTGTGCGGTGC
CCGCACTGTGCCAAGTCGCCTGTCTCTGCCTCCACCATCTGCTTCCTGACCACGCCCCAGGCCA
GTCTGTGGCCCTCCTGCCCAACATGACTCAGCTCTATATGCAGATGGTGCTCGCCCTCAGCCCC
CCTGGGCACTTGCCCACCTCGTCCCTACTGGACCTGGGGGAGGTGGCCCTGAGGGGCCTGGAGA
CAGGGAAGGTTATCTTCTATGCAAAAGATATTGCTCCACCCTTGATAGCTTTTGGGGCCACTCA
CAGCCTGCTGACTTCCTTCTGCGTCTGCACAGGCCCTGGGCACCAGCAGACAGGCTATGCTTTC
ACCCACCTCAGCCTGCAGGAGTTTCTTGCTGCCCTGCACCTGATGGCCAGCCCCAAGGTGAACA
AAGACACACTTACCCAGTATGTTACCCTCCATTCCCGCTGGGTACAGCGGACCAAAGCTAGACT
GGGCCTCTCAGACCACCTCCCCACCTTCCTGGCGGGCCTGGCATCCTGCACCTGCCGCCCCTTC
CTTAGCCACCTGGCGCAGGGCAATGAGGACTGTGTGGGTGCCAAGCAGGCTGCTGTAGTGCAGG
TGTTGAAGAAGTTGGCCACCCGCAAGCTCACAGGGCCAAAGGTTGTAGAGCTGTGTCACTGTGT
GGATGAGACACAGGAGCCTGAGCTGGCCAGTCTCACCGCACAAAGCCTCCCCTATCAACTGCCC
TTCCACAATTTCCCACTGACCTGCACCGACCTGGCCACCCTGACCAACATCCTAGAGCACAGGG
AGGCCCCCATCCACCTGGATTTTGATGGCTGTCCCCTGGAGCCCCACTGCCCTGAGGCTCTGGT
AGGCTGTGGGCAGATAGAGAATCTCAGCTTTAAGAGCAGGAAGTGTGGGGATGCCTTTGCAGAA
GCCCTCTCCAGGAGCTTGCCGACAATGGGGAGGCTGCAGATGCTGGGGTTAGCAGGAAGTAAAA
TCACTGCCCGAGGCATCAGCCACCTGGTGAAAGCTTTGCCTCTCTGTCCACAGCTGAAAGAAGT
CAGTTTTCGGGACAACCAGCTCAGTGACCAGGTGGTGCTGAACATTGTGGAGGTTCTCCCTCAC
CTACCACGGCTCCGGAAGCTTGACCTGAGCAGCAACAGCATCTGCGTGTCAACCCTACTCTGCT
TGGCAAGGGTGGCAGTCACGTGTCCTACCGTCAGGATGCTTCAGGCCAGGGAGGCGGACCTCAT
CTTCCTTCTTTCCCCGCCCACAGAGACAACTGCAGAGCTACAAAGAGCTCCAGACCTGCAGGAA
AGTGACGGCCAGAGGAAAGGGGCTCAGAGCAGAAGCTTGACGCTCAGGCTGCAGAAGTGTCAGC
TCCAGGTCCACGATGCGGAGGCCCTCATAGCCCTGCTCCAGGAAGGCCCTCACCTGGAGGAAGT
GGACCTCTCAGGGAACCAGCTGGAAGATGAAGGCTGTCGGCTGATGGCAGAGGCTGCATCCCAG
CTGCACATCGCCAGGAAGCTGGACCTCAGTAACAACGGGCTTTCTGTGGCCGGGGTGCATTGTG
TGCTGAGGGCCGTGAGTGCGTGCTGGACCCTGGCAGAGCTGCACATCAGCCTGCAGCACAAAAC
TGTGATCTTCATGTTTGCCCAGGAGCCAGAGGAGCAGAAGGGGCCCCAGGAGAGGGCTGCATTT
CTTGACAGCCTCATGCTCCAGATGCCCTCTGAGCTGCCTCTGAGCTCCCGAAGGATGAGGCTGA
CACATTGTGGCCTCCAAGAAAAGCACCTAGAGCAGCTCTGCAAGGCTCTGGGAGGAAGCTGCCA
CCTCGGTCACCTCCACCTCGACTTCTCAGGCAATGCTCTGGGGGATGAAGGTGCAGCCCGGCTG
GCTCAGCTGCTCCCAGGGCTGGGAGCTCTGCAGTCCTTGAACCTCAGTGAGAACGGTTTGTCCC
TGGATGCCGTGTTGGGTTTGGTTCGGTGCTTCTCCACTCTGCAGTGGCTCTTCCGCTTGGACAT
CAGCTTTGAAAGCCAACACATCCTCCTGAGAGGGGACAAGACAAGCAGGGATATGTGGGCCACT
GGATCTTTGCCAGACTTCCCAGCTGCAGCCAAGTTCTTAGGGTTCCGTCAGCGCTGCATCCCCA
GGAGCCTCTGCCTCAGTGAGTGTCCTCTGGAGCCCCCAAGCCTCACCCGCCTCTGTGCCACTCT
GAAGGACTGCCCGGGACCCCTGGAACTGCAATTGTCCTGTGAGTTCCTGAGTGACCAGAGCCTG
GAGACTCTACTGGACTGCTTACCTCAACTCCCTCAGCTGAGCCTGCTGCAGCTGAGCCAGACGG
GACTGTCCCCGAAAAGCCCCTTCCTGCTGGCCAACACCTTAAGCCTGTGTCCACGGGTTAAAAA
GGTGGATCTCAGGTCCCTGCACCATGCAACTTTGCACTTCAGATCCAACGAGGAGGAGGAAGGC
GTGTGCTGTGGCAGGTTCACAGGCTGCAGCCTCAGCCAGGAGCACGTAGAGTCACTCTGCTGGT
TGCTGAGCAAGTGTAAAGACCTCAGCCAGGTGGATCTCTCAGCAAACCTGCTGGGCGACAGCGG
ACTCAGATGCCTTCTGGAATGTCTGCCGCAGGTGCCCATCTCCGGTTTGCTTGATCTGAGTCAC
AACAGCATTTCTCAGGAAAGTGCCCTGTACCTGCTGGAGACACTGCCCTCCTGCCCACGTGTCC
GGGAGGCCTCAGTGAACCTGGGCTCTGAGCAGAGCTTCCGGATTCACTTCTCCAGAGAGGACCA
GGCTGGGAAGACACTCAGGCTAAGTGAGTGCAGCTTCCGGCCAGAGCACGTGTCCAGGCTGGCC
ACCGGCTTGAGCAAGTCCCTGCAGCTGACGGAGCTCACGCTGACCCAGTGCTGCCTGGGCCAGA
AGCAGCTGGCCATCCTCCTGAGCTTGGTGGGGCGACCCGCAGGGCTGTTCAGCCTCAGGGTGCA
GGAGCCGTGGGCGGACAGAGCCAGGGTTCTCTCCCTGTTAGAAGTCTGCGCCCAGGCCTCAGGC
AGTGTCACTGAAATCAGCATCTCCGAGACCCAGCAGCAGCTCTGTGTCCAGCTGGAATTTCCTC
GCCAGGAAGAGAATCCAGAAGCTGTGGCACTCAGGTTGGCTCACTGTGACCTTGGAGCCCACCA
CAGCCTTCTTGTCGGGCAGCTGATGGAGACATGTGCCAGGCTGCAGCAGCTCAGCTTGTCTCAG
GTTAACCTCTGTGAGGACGATGATGCCAGTTCCCTGCTGCTGCAGAGCCTCCTGCTGTCCCTCT
CTGAGCTGAAGACATTTCGGCTGACCTCCAGCTGTGTGAGCACCGAGGGCCTCGCCCACCTGGC
ATCTGGTCTGGGCCACTGCCACCACTTGGAGGAGCTGGACTTGTCTAACAATCAATTTGATGAG
GAGGGCACCAAGGCGCTGATGAGGGCCCTTGAGGGGAAATGGATGCTAAAGAGGCTGGACCTCA
GTCACCTTCTGCTGAACAGCTCCACCTTGGCCTTGCTTACTCACAGACTAAGCCAGATGACCTG
CCTGCAGAGCCTCAGACTGAACAGGAACAGTATCGGTGATGTCGGTTGCTGCCACCTTTCTGAG
GCTCTCAGGGCTGCCACCAGCCTAGAGGAGCTGGACTTGAGCCACAACCAGATTGGAGACGCTG
GTGTCCAGCACTTAGCTACCATCCTGCCTGGGCTGCCAGAGCTCAGGAAGATAGACCTCTCAGG
GAATAGCATCAGCTCAGCCGGGGGAGTGCAGTTGGCAGAGTCTCTCGTTCTTTGCAGGCGCCTG
GAGGAGTTGATGCTTGGCTGCAATGCCCTGGGGGATCCCACAGCCCTGGGGCTGGCTCAGGAGC
TGCCCCAGCACCTGAGGGTCCTACACCTACCATTCAGCCATCTGGGCCCAGGTGGGGCCCTGAG
CCTGGCCCAGGCCCTGGATGGATCCCCCCATTTGGAAGAGATCAGCTTGGCGGAAAACAACCTG
GCTGGAGGGGTCCTGCGTTTCTGTATGGAGCTCCCGCTGCTCAGACAGATAGACCTGGTTTCCT
GTAAGATTGACAACCAGACTGCCAAGCTCCTCACCTCCAGCTTCACGAGCTGCCCTGCCCTGGA
AGTAATCTTGCTGTCCTGGAATCTCCTCGGGGATGAGGCAGCTGCCGAGCTGGCCCAGGTGCTG
CCGCAGATGGGCCGGCTGAAGAGAGTGGACCTGGAGAAGAATCAGATCACAGCTTTGGGGGCCT
GGCTCCTGGCTGAAGGACTGGCCCAGGGGTCTAGCATCCAAGTCATCCGCCTCTGGAATAACCC
CATTCCCTGCGACATGGCCCAGCACCTGAAGAGCCAGGAGCCCAGGCTGGACTTTGCCTTCTTT
GACAACCAGCCCCAGGCCCCTTGGGGTACTTGA
The NLRC genecorresponds to Ensembl:ENSG00000140853 MIM:613537.

[0091] By “protein disulfide isomerase family A member 3 (PDIA3; ERp57) polypeptide” (previously known as phospholipase C-alpha) is meant a protein having at least about 85% amino acid sequence identity to GenBank Accession No. CAA89996.1, which is provided below, or a fragment thereof having immunomodulatory activity.

> CAA89996.1 protein disulfide isomerase
(alternatively BAA03759.1 phospholipase C-alpha) [Homo sapiens]
(SEQ ID NO: 1038)
[sequence omitted]

[0092] By “protein disulfide isomerase family A member 3 (PDIA3; ERp57) polynucleotide” is meant a nucleic acid molecule encoding an PDIA3 polypeptide, as well as the introns, exons, 3′ untranslated regions, 5′ untranslated regions, and regulatory sequences associated with its expression, or fragments thereof. An exemplary PDIA3 polynucleotide sequence is provided at GenBank Accession No. D16234.1, which is provided below.

>D16234.1:68-1585 Homo sapiens mRNA for phospholipase C-alpha,
complete cds
(SEQ ID NO: 1039)
ATGCGCCTCCGCCGCCTAGCGCTGTTCCCGGGTGTGGCGCTGCTTCTTGCCGCGGCCCGCCTCG
CCGCTGCCTCCGACGTGCTAGAACTCACGGACGACAACTTCGAGAGTCGCATCTCCGACACGGG
CTCTGCGGGCCTCATGCTCGTCGAGTTCTTCGCTCCCTGGTGTGGACACTGCAAGAGACTTGCA
CCTGAGTATGAAGCTGCAGCTACCAGATTAAAAGGAATAGTCCCATTAGCAAAGGTTGATTGCA
CTGCCAACACTAACACCTGTAATAAATATGGAGTCAGTGGATATCCAACCCTGAAGATATTTAG
AGATGGTGAAGAAGCAGGTGCTTATGATGGACCTAGGACTGCTGATGGAATTGTCAGCCACTTG
AAGAAGCAGGCAGGACCAGCTTCAGTGCCTCTCAGGACTGAGGAAGAATTTAAGAAATTCATTA
GTGATAAAGATGCCTCTATAGTAGGTTTTTTCGATGATTCATTCAGTGAGGCTCACTCCGAGTT
CCTAAAAGCAGCCAGCAACTTGAGGGATAACTACCGATTTGCACATACGAATGTTGAGTCTCTG
GTGAACGAGTATGATGATAATGGAGAGGGTATCATCTTATTTCGTCCTTCACATCTCACTAACA
AGTTTGAGTACAAGACTGTGGCATATACAGAGCAAAAAATGACCAGTGGCAAAATTAAAAAGTT
TATCCAGGAAAACATTTTTGGTATCTGCCCTCACATGACAGAGGACAATAAAGATTTGATACAG
GGCAAGGACTTACTTATTGCTTACTATGATGTGGACTATGAAAAGGACGCTAAAGGTTCCAACT
ACTGGAGAAACAGGGTAATGATGGTGGCAAAGAAATTCCTGGATGCTGGGCACAAACTCAACTT
TGCTGTAGCTAGCCGCAAAACCTTTAGCCATGAACTTTCTGATTTTGGCTTGGAGAGCACTGCT
GGAGAGATTCCTGTTGTTGCTATCAGGACTGCTAAAGGAGAGAAGTTTGTCATGCAGGAGGAGT
TCTCGCGTGATGGGAAGGCTCTGGAGAGGTTCCTGCAGGGTTACTTTGGTGGCAATCTGAAGAG
ATACCTGAAGTCTGACCCTATCCCAGAGAGCAATGATGGGCCTGTGAAGGTAGTGGTAGCAGAG
AATTTTGATGAAATAGTGAATAATGAAAATAAAGATGTGCTGATTGAATTTTATGCCCCTTGGT
GTGGTCATTGTAAGAACCTGGAGCCCAAGTATAAAGAACTTGGCGAGAAGCTCAGCAAAGACCC
AAATATCGTCATAGCCAAGATGGATGCCACAGCCAATGATGTGCCTTCTCCATATGAAGTCAGA
GGTTTTCCTACCATATACTTCTCTCCAGCCAACAAGAAGCTAAATCCAAAGAAATATGAAGGTG
GCCGTGAATTAAGTGATTTTATTAGCTATCTACAAAGAGAAGCTACAAACCCCCCTGTAATTCA
AGAAGAAAAACCCAAGAAGAAGAAGAAGGCACAGGAGGATCTCTAA.
The PDIA3 gene corresponds to Ensembl:ENSG00000167004.

[0093] By “UL16 binding protein 1-6 (ULBP) polypeptide” is meant a protein having at least about 85% amino acid sequence identity to GenBank Accession No. AAK13081.1, AAK13082.1, or AAK13083.1, AVP72463.1, or NCBI Ref. Seq. No. NP_001001788.2 or NP_570970.2, which are provided below, or a fragment thereof having NKG2D receptor binding activity.

>AAK13083.1 ULBP3 protein [Homo sapiens]
(SEQ ID NO: 1040)
MAAAASPAILPRLAILPYLLFDWSGTGRADAHSLWYNFTIIHLPRHGQQWCEVQSQVDQKNFLS
YDCGSDKVLSMGHLEEQLYATDAWGKQLEMLREVGQRLRLELADTELEDFTPSGPLTLQVRMSC
ECEADGYIRGSWQFSFDGRKFLLFDSNNRKWTVVHAGARRMKEKWEKDSGLTTFFKMVSMRDCK
SWLRDFLMHRKKRLEPTAPPTMAPGLAQPKAIATTLSPWSFLIILCFILPGI.
>AAK13082.1 ULBP2 protein [Homo sapiens]
(SEQ ID NO: 1041)
MAAAAATKILLCLPLLLLLSGWSRAGRADPHSLCYDITVIPKFRPGPRWCAVQGQVDEKTFLHY
DCGNKTVTPVSPLGKKLNVTTAWKAQNPVLREVVDILTEQLRDIQLENYTPKEPLTLQARMSCE
QKAEGHSSGSWQFSFDGQIFLLFDSEKRMWTTVHPGARKMKEKWENDKVVAMSFHYFSMGDCIG
WLEDFLMGMDSTLEPSAGAPLAMSSGTTQLRATATTLILCCLLIILPCFILPGI.
>AAK13081.1 ULBP1 protein [Homo sapiens]
(SEQ ID NO: 1042)
MAAAASPAFLLCLPLLHLLSGWSRAGWVDTHCLCYDFIITPKSRPEPQWCEVQGLVDERPFLHY
DCVNHKAKAFASLGKKVNVTKTWEEQTETLRDVVDFLKGQLLDIQVENLIPIEPLTLQARMSCE
HEAHGHGRGSWQFLFNGQKFLLFDSNNRKWTALHPGAKKMTEKWEKNRDVTMFFQKISLGDCKM
WLEEFLMYWEQMLDPTKPPSLAPGTTQPKAMATTLSPWSLLIIFLCFILAGR.
>AVP72463.1 ULBP4 [Homo sapiens]
(SEQ ID NO: 1080)
[sequence omitted]
>NP 001001788.2 UL-16 binding protein 5 preproprotein [Homo sapiens]
(SEQ ID NO: 1081)
MAAAASPAFLLRLPLLLLLSSWCRTGLADPHSLCYDITVIPKFRPGPRWCAVQGQVDEKTFLHY
DCGSKTVTPVSPLGKKLNVTTAWKAQNPVLREVVDILTEQLLDIQLENYIPKEPLTLQARMSCE
QKAEGHGSGSWQLSFDGQIFLLFDSENRMWTTVHPGARKMKEKWENDKDMTMSFHYISMGDCTG
WLEDFLMGMDSTLEPSAGAPPTMSSGTAQPRATATTLILCCLLIMCLLICSRHSLTQSHGHHPQ
SLQPPPHPPLLHPTWLLRRVLWSDSYQIAKRPLSGGHVTRVTLPIIGDDSHSLPCPLALYTINN
GAARYSEPLQVSIS.
>NP 570970.2 UL16-binding protein 6 precursor [Homo sapiens]
(SEQ ID NO: 1082)
MAAAAIPALLLCLPLLFLLFGWSRARRDDPHSLCYDITVIPKFRPGPRWCAVQGQVDEKTFLHY
DCGNKTVTPVSPLGKKLNVTMAWKAQNPVLREVVDILTEQLLDIQLENYTPKEPLTLQARMSCE
QKAEGHSSGSWQFSIDGQTFLLFDSEKRMWTTVHPGARKMKEKWENDKDVAMSFHYISMGDCIG
WLEDFLMGMDSTLEPSAGAPLAMSSGTTQLRATATTLILCCLLIILPCFILPGI.

[0094] By “UL16 binding protein 1-6 (ULBP) polynucleotide” is meant a nucleic acid molecule encoding an ULBP polypeptide, as well as the introns, exons, 3′ untranslated regions, 5′ untranslated regions, and regulatory sequences associated with its expression, or fragments thereof. An exemplary ULBP polynucleotide sequence is provided at GenBank Accession Nos. AF304379.1, AF304378.1, AF304377.1, MH020173.1, and NCBI Ref. Seq. Nos. NM_001001788.4 and NM_130900.3 which are provided below.

>AF304379.1 Homo sapiens ULBP3 protein mRNA, complete cds
(SEQ ID NO: 1043)
ATGGCAGCGGCCGCCAGCCCCGCGATCCTTCCGCGCCTCGCGATTCTTCCGTACCTGCTATTCG
ACTGGTCCGGGACGGGGGGGGCCGACGCTCACTCTCTCTGGTATAACTTCACCATCATTCATTT
GCCCAGACATGGGCAACAGTGGTGTGAGGTCCAGAGCCAGGTGGATCAGAAGAATTTTCTCTCC
TATGACTGTGGCAGTGACAAGGTCTTATCTATGGGTCACCTAGAAGAGCAGCTGTATGCCACAG
ATGCCTGGGGAAAACAACTGGAAATGCTGAGAGAGGTGGGGCAGAGGCTCAGACTGGAACTGGC
TGACACTGAGCTGGAGGATTTCACACCCAGTGGACCCCTCACGCTGCAGGTCAGGATGTCTTGT
GAGTGTGAAGCCGATGGATACATCCGTGGATCTTGGCAGTTCAGCTTCGATGGACGGAAGTTCC
TCCTCTTTGACTCAAACAACAGAAAGTGGACAGTGGTTCACGCTGGAGCCAGGCGGATGAAAGA
GAAGTGGGAGAAGGATAGCGGACTGACCACCTTCTTCAAGATGGTCTCAATGAGAGACTGCAAG
AGCTGGCTTAGGGACTTCCTGATGCACAGGAAGAAGAGGCTGGAACCCACAGCACCACCCACCA
TGGCCCCAGGCTTAGCTCAACCCAAAGCCATAGCCACCACCCTCAGTCCCTGGAGCTTCCTCAT
CATCCTCTGCTTCATCCTCCCTGGCATCTGA.
>AF304378.1 Homo sapiens ULBP2 protein mRNA, complete cds
(SEQ ID NO: 1044)
ATGGCAGCAGCCGCCGCTACCAAGATCCTTCTGTGCCTCCCGCTTCTGCTCCTGCTGTCCGGCT
GGTCCCGGGCTGGGCGAGCCGACCCTCACTCTCTTTGCTATGACATCACCGTCATCCCTAAGTT
CAGACCTGGACCACGGTGGTGTGCGGTTCAAGGCCAGGTGGATGAAAAGACTTTTCTTCACTAT
GACTGTGGCAACAAGACAGTCACACCTGTCAGTCCCCTGGGGAAGAAACTAAATGTCACAACGG
CCTGGAAAGCACAGAACCCAGTACTGAGAGAGGTGGTGGACATACTTACAGAGCAACTGCGTGA
CATTCAGCTGGAGAATTACACACCCAAGGAACCCCTCACCCTGCAGGCAAGGATGTCTTGTGAG
CAGAAAGCTGAAGGACACAGCAGTGGATCTTGGCAGTTCAGTTTCGATGGGCAGATCTTCCTCC
TCTTTGACTCAGAGAAGAGAATGTGGACAACGGTTCATCCTGGAGCCAGAAAGATGAAAGAAAA
GTGGGAGAATGACAAGGTTGTGGCCATGTCCTTCCATTACTTCTCAATGGGAGACTGTATAGGA
TGGCTTGAGGACTTCTTGATGGGCATGGACAGCACCCTGGAGCCAAGTGCAGGAGCACCACTCG
CCATGTCCTCAGGCACAACCCAACTCAGGGCCACAGCCACCACCCTCATCCTTTGCTGCCTCCT
CATCATCCTCCCCTGCTTCATCCTCCCTGGCATCTGA.
>AF304377.1 Homo sapiens ULBP1 protein mRNA, complete cds
(SEQ ID NO: 1045)
ATGGCAGCGGCCGCCAGCCCCGCCTTCCTTCTGTGCCTCCCGCTTCTGCACCTGCTGTCTGGCT
GGTCCCGGGCAGGATGGGTCGACACACACTGTCTTTGCTATGACTTCATCATCACTCCTAAGTC
CAGACCTGAACCACAGTGGTGTGAAGTTCAAGGCCTGGTGGATGAAAGGCCTTTTCTTCACTAT
GACTGTGTTAACCACAAGGCCAAAGCCTTTGCTTCTCTGGGGAAGAAAGTCAATGTCACAAAAA
CCTGGGAAGAACAAACTGAAACACTAAGAGACGTGGTGGATTTCCTTAAAGGGCAACTGCTTGA
CATTCAAGTGGAGAATTTAATACCCATTGAGCCCCTCACCCTGCAGGCCAGGATGTCTTGTGAG
CATGAAGCCCATGGACACGGCAGAGGATCTTGGCAGTTCCTCTTCAATGGACAGAAGTTCCTCC
TCTTTGACTCAAACAACAGAAAGTGGACAGCACTTCATCCTGGAGCCAAGAAGATGACAGAGAA
GTGGGAGAAGAACAGGGATGTGACCATGTTCTTCCAGAAGATTTCACTGGGGGATTGTAAGATG
TGGCTTGAAGAATTTTTGATGTACTGGGAACAAATGCTGGATCCAACAAAACCACCCTCTCTGG
CCCCAGGCACAACCCAACCCAAGGCCATGGCCACCACCCTCAGTCCCTGGAGCCTTCTCATCAT
CTTCCTCTGCTTCATTCTAGCTGGCAGATGA.
>MH020173.1:64-831 Homo sapiens ULBP4 mRNA, complete cds
(SEQ ID NO: 1083)
ATGCGAAGAATATCCCTGACTTCTAGCCCTGTGTGCCTTCTTTTGTTTCTGCTGTTGCTACTAA
TAGCCTTGGAGATCATGGTTGGTGGTCACTCTCTTTGCTTCAACTTCACTATAAAATCATTGTC
CAGACCTGGACAGCCCTGGTGTGAAGCGCAGGTCTTCTTGAATAAAAATCTTTTCCTTCAGTAC
AACAGTGACAACAACATGGTCAAACCTCTGGGCCTCCTGGGGAAGAAGGTAAATGCCACCAGCA
CTTGGGGAGAATTGACCCAAACGCTGGGAGAAGTGGGGCGAGACCTCAGGATGCTCCTTTGTGA
CATCAAACCCCAGATAAAGACCAGTGATCCTTCCACTCTGCAAGTCGAGATGTTTTGTCAACGT
GAAGCAGAACGGTGCACTGGTGCATCCTGGCAGTTCGCCACCAATGGAGAGAAATCCCTCCTCT
TTGACGCAATGAACATGACCTGGACAGTAATTAATCATGAAGCCAGTAAGATCAAGGAGACATG
GAAGAAAGACAGAGGGCTGGAAAAGTATTTCAGGAAGCTCTCAAAGGGAGACTGCGATCACTGG
CTCAGGGAATTCTTAGGGCACTGGGAGGCAATGCCAGAACCGACAGTGTCACCAGTAAATGCTT
CAGATATCCACTGGTCTTCTTCTAGTCTACCAGATAGATGGATCATCCTGGGGGCATTCATCCT
GTTAGTTTTAATGGGAATTGTTCTCATCTGTGTCTGGTGGCAAAATGGCAGAAGATCCACCTAG.
>NM_001001788.4:112-1116 Homo sapiens retinoic acid early
transcript 1G (RAETIG), transcript variant 1, mRNA
(SEQ ID NO: 1084)
ATGGCAGCGGCCGCCAGCCCCGCGTTCCTTCTACGCCTCCCGCTTCTGCTCCTGCTGTCCAGCT
GGTGCAGGACCGGGCTGGCCGACCCTCACTCTCTTTGCTATGACATCACCGTCATCCCTAAGTT
CAGACCTGGACCACGGTGGTGTGCGGTTCAAGGCCAGGTGGATGAAAAGACTTTTCTTCACTAT
GACTGTGGCAGCAAGACAGTCACACCCGTCAGTCCCCTGGGGAAGAAACTAAATGTCACAACGG
CCTGGAAAGCACAGAACCCAGTACTGAGAGAGGTGGTGGACATACTTACAGAGCAACTGCTTGA
CATTCAGCTGGAGAATTACATACCCAAGGAACCCCTCACCCTGCAGGCCAGGATGTCTTGTGAG
CAGAAAGCCGAAGGACACGGCAGTGGATCTTGGCAGCTCAGTTTCGATGGACAGATCTTCCTCC
TCTTTGACTCAGAAAACAGAATGTGGACAACGGTTCATCCTGGAGCCAGAAAGATGAAAGAAAA
GTGGGAGAATGACAAGGATATGACCATGTCCTTCCATTACATCTCAATGGGAGACTGCACAGGA
TGGCTTGAGGACTTCTTGATGGGCATGGACAGCACCCTGGAGCCAAGTGCAGGAGCACCACCCA
CCATGTCCTCAGGCACAGCCCAACCCAGGGCCACGGCCACCACCCTCATCCTTTGCTGCCTCCT
CATCATGTGTCTCCTCATATGCTCCAGGCACAGTCTGACCCAAAGCCATGGCCACCACCCTCAG
TCCCTGCAGCCTCCTCCTCATCCTCCCCTGCTTCATCCTACCTGGCTGCTGAGGAGAGTCCTTT
GGAGTGACAGCTACCAAATAGCGAAGCGCCCCTTGTCTGGTGGACACGTGACTCGCGTGACTTT
ACCTATCATTGGAGACGACTCACACTCCTTACCCTGCCCTCTTGCCTTGTATACAATAAATAAC
GGCGCAGCCAGGTATTCGGAGCCACTACAGGTCTCCATATCTTGA.
>NM_130900.3:62-802 Homo sapiens retinoic acid early transcript
1L (RAETIL), mRNA
(SEQ ID NO: 1085)
ATGGCAGCAGCCGCCATCCCAGCTTTGCTTCTGTGCCTCCCGCTTCTGTTCCTGCTGTTCGGCT
GGTCCCGGGCTAGGCGAGACGACCCTCACTCTCTTTGCTATGACATCACCGTCATCCCTAAGTT
CAGACCTGGACCACGGTGGTGTGCGGTTCAAGGCCAGGTGGATGAAAAGACTTTTCTTCACTAT
GACTGTGGCAACAAGACAGTCACACCCGTCAGTCCCCTGGGGAAGAAACTAAATGTCACAATGG
CCTGGAAAGCACAGAACCCAGTACTGAGAGAGGTGGTGGACATACTTACAGAGCAACTGCTTGA
CATTCAGCTGGAGAATTACACACCCAAGGAACCCCTCACCCTGCAGGCAAGGATGTCTTGTGAG
CAGAAAGCTGAAGGACACAGCAGTGGATCTTGGCAGTTCAGTATCGATGGACAGACCTTCCTAC
TCTTTGACTCAGAGAAGAGAATGTGGACAACGGTTCATCCTGGAGCCAGAAAGATGAAAGAAAA
GTGGGAGAATGACAAGGATGTGGCCATGTCCTTCCATTACATCTCAATGGGAGACTGCATAGGA
TGGCTTGAGGACTTCTTGATGGGCATGGACAGCACCCTGGAGCCAAGTGCAGGAGCACCACTCG
CCATGTCCTCAGGCACAACCCAACTCAGGGCCACAGCCACCACCCTCATCCTTTGCTGCCTCCT
CATCATCCTCCCCTGCTTCATCCTCCCTGGCATCTGA.
ULBPI gene corresponds to ENSG00000111981; ULBP2 gene corresponds
to Ensembl:ENSG00000131015; ULBP3 gene corresponds to ENSG00000131019;
ULBP4 gene corresponds to ENSG00000164520; ULBP5 gene corresponds to
Ensembl (ENSG00000203722); and ULBP6 corresponds to
Ensembl:ENSG00000155918.

[0095] By “regulatory element” is meant a fragment of a nucleic acid molecule that modulates expression of a polynucleotide and/or polypeptide. In various embodiments, the regulatory element increases or decreases transcription of a gene. Non-limiting examples of regulatory elements include promoters, enhancers, silencers, and untranslated regions (UTRs).

[0096] By “persistence” in the context of an allogeneic transplant is meant the continued survival of a donor cell in a host organism. In some embodiments, allogeneic cell(s) comprising one or more of the edits described herein (e.g., a base edit in a β2M, TAP1, TAP2, Tapasin, CD58 gene, or regulatory element(s) thereof; knockdown of a β2M, TAP1, TAP2, Tapasin, and/or CD58 gene; knock-out of HLA-A, -B, and/or -C; base edit in HLA-A, -B, and/or -C; and/or overexpression of HLA-E, HLA-G, PD-L1, and/or CD47) persist in a subject allogeneic to the cells at higher levels over time post-infusion than corresponding unedited allogeneic control cells. In embodiments, the percentage of edited cells (e.g., T cells, NK cells, or lymphocytes) persisting in a subject at a given time point (e.g., 7 days, 14 days, 1 month, 3 months, 6 months, 9 months, or greater than 1, 2, or 3 years is at least about 10%, 15%, 20%, 25%, 30%, 35%, 40%, 45%, 50%, 60%, 70%, 80%, 90%, 95%, 99%, or 100% greater than the level of unedited control cells at the same time point. A cell(s) modified by methods of the present disclosure are more persistent than a reference unmodified cell(s).

[0097] By “adenine” or “9H-Purin-6-amine” is meant a purine nucleobase with the molecular formula C₅H₅N₅, having the structure

[chemical structure]

and corresponding to CAS No. 73-24-5.

[0098] By “adenosine” or “4-Amino-1-[(2R,3R,4S,5R)-3,4-dihydroxy-5-(hydroxymethyl)oxolan-2-yl]pyrimidin-2(1H)-one” is meant an adenine molecule attached to a ribose sugar via a glycosidic bond, having the structure

[chemical structure]

and corresponding to CAS No. 65-46-3. Its molecular formula is C₁₀H₁₃N₅O₄.

[0099] By “adenosine deaminase” or “adenine deaminase” is meant a polypeptide or fragment thereof capable of catalyzing the hydrolytic deamination of adenine or adenosine. In some embodiments, the deaminase or deaminase domain is an adenosine deaminase catalyzing the hydrolytic deamination of adenosine to inosine or deoxy adenosine to deoxyinosine. In some embodiments, the adenosine deaminase catalyzes the hydrolytic deamination of adenine or adenosine in deoxyribonucleic acid (DNA). The adenosine deaminases (e.g. engineered adenosine deaminases, evolved adenosine deaminases) provided herein may be from any organism (e.g., eukaryotic, prokaryotic), including but not limited to algae, bacteria, fungi, plants, invertebrates (e.g., insects), and vertebrates (e.g., amphibians, mammals). In some embodiments, the adenosine deaminase is an adenosine deaminase variant with one or more alterations and is capable of deaminating both adenine and cytosine in a target polynucleotide (e.g., DNA, RNA) and may be referred to as a “dual deaminase”. Non-limiting examples of dual deaminases include those described in PCT/US22/22050. In some embodiments, the target polynucleotide is single or double stranded. In some embodiments, the adenosine deaminase variant is capable of deaminating both adenine and cytosine in DNA. In some embodiments, the adenosine deaminase variant is capable of deaminating both adenine and cytosine in single-stranded DNA. In some embodiments, the adenosine deaminase variant is capable of deaminating both adenine and cytosine in RNA. In embodiments, the adenosine deaminase variant is selected from those described in PCT/US2020/018192, PCT/US2020/049975, and PCT/US2017/045381.

[0100] By “adenosine deaminase activity” is meant catalyzing the deamination of adenine or adenosine to guanine in a polynucleotide. In some embodiments, an adenosine deaminase variant as provided herein maintains adenosine deaminase activity (e.g., at least about 30%, 40%, 50%, 60%, 70%, 80%, 90% or more of the activity of a reference adenosine deaminase (e.g., TadA*8.20 or TadA*8.19)).

[0101] By “Adenosine Base Editor (ABE)” is meant a base editor comprising an adenosine deaminase.

[0102] By “Adenosine Base Editor (ABE) polynucleotide” is meant a polynucleotide encoding an ABE.

[0103] By “Adenosine Base Editor 8 (ABE8) polypeptide” or “ABE8” is meant a base editor as defined herein comprising an adenosine deaminase or adenosine deaminase variant comprising one or more of the alterations listed in Table 14, one of the combinations of alterations listed in Table 14, or an alteration at one or more of the amino acid positions listed in Table 14, such alterations are relative to the following reference sequence: MSEVEFSHEYWMRHALTLAKRARDEREVPVGAVLVLNNRVIGEGWNRAIGLHDPTAHAEIMALR QGGLVMQNYRLIDATLYVTFEPCVMCAGAMIHSRIGRVVFGVRNAKTGAAGSLMDVLHYPGMNH RVEITEGILADECAALLCYFFRMPRQVFNAQKKAQSSTD (SEQ ID NO: 1), or a corresponding position in another adenosine deaminase. In embodiments, ABE8 comprises alterations at amino acids 82 and/or 166 of SEQ ID NO: 1. In some embodiments, ABE8 comprises further alterations, as described herein, relative to the reference sequence.

[0104] By “Adenosine Base Editor 8 (ABE8) polynucleotide” is meant a polynucleotide encoding an ABE8 polypeptide.

[0105] “Administering” is referred to herein as providing one or more compositions described herein to a patient or a subject.

[0106] By “agent” is meant any small molecule chemical compound, antibody, nucleic acid molecule, or polypeptide, or fragments thereof.

[0107] “Allogeneic,” as used herein, refers to cells that are genetically dissimilar and immunologically incompatible. In embodiments, allogeneic cells are administered to a genetically dissimilar and immunologically incompatible subject. In some embodiments, the allogeneic cells comprise modifications improving their persistence in the subject allogeneic to the cells.

[0108] By “alteration” is meant a change (increase or decrease) in the level, structure, or activity of an analyte, gene or polypeptide as detected by standard art known methods such as those described herein. As used herein, an alteration includes a 10% change (e.g., increase or decrease) in expression levels. In embodiments, the increase in expression levels is by 10%, 25%, 40%, 50% or greater. In some embodiments, an alteration includes an insertion, deletion, or substitution of a nucleobase or amino acid (by, e.g., genetic engineering).

[0109] By “ameliorate” is meant decrease, suppress, attenuate, diminish, arrest, or stabilize the development or progression of a disease.

[0110] By “analog” is meant a molecule that is not identical, but has analogous functional or structural features. For example, a polypeptide analog retains the biological activity of a corresponding naturally-occurring polypeptide, while having certain biochemical modifications that enhance the analog's function relative to a naturally occurring polypeptide. Such biochemical modifications could increase the analog's protease resistance, membrane permeability, or half-life, without altering, for example, ligand binding. An analog may include an unnatural amino acid.

[0111] “Autologous,” as used herein, refers to cells from the same subject or genetically identical subject.

[0112] By “base editor (BE),” or “nucleobase editor polypeptide (NBE)” is meant an agent that binds a polynucleotide and has nucleobase modifying activity. In various embodiments, the base editor comprises a nucleobase modifying polypeptide (e.g., a deaminase) and a polynucleotide programmable nucleotide binding domain (e.g., Cas9 or Cpf1) in conjunction with a guide polynucleotide (e.g., guide RNA (gRNA)). Representative nucleic acid and protein sequences of base editors include those sequences with about or at least about 85% sequence identity to any base editor sequence provided in the Sequence Listing, such as those corresponding to SEQ ID NOs:2-11.

[0113] By “base editing activity” is meant acting to chemically alter a base within a polynucleotide. In one embodiment, a first base is converted to a second base. In one embodiment, the base editing activity is cytidine deaminase activity, e.g., converting target C·G to T·A. In another embodiment, the base editing activity is adenosine or adenine deaminase activity, e.g., converting A·T to G·C.

[0114] The term “base editor system” refers to an intermolecular complex for editing a nucleobase of a target nucleotide sequence. In various embodiments, the base editor (BE) system comprises (1) a polynucleotide programmable nucleotide binding domain, a deaminase domain (e.g., cytidine deaminase or adenosine deaminase) for deaminating nucleobases in the target nucleotide sequence; and (2) one or more guide polynucleotides (e.g., guide RNA) in conjunction with the polynucleotide programmable nucleotide binding domain. In various embodiments, the base editor (BE) system comprises a nucleobase editor domain selected from an adenosine deaminase or a cytidine deaminase, and a domain having nucleic acid sequence specific binding activity. In some embodiments, the base editor system comprises (1) a base editor (BE) comprising a polynucleotide programmable DNA binding domain and a deaminase domain for deaminating one or more nucleobases in a target nucleotide sequence; and (2) one or more guide RNAs in conjunction with the polynucleotide programmable DNA binding domain. In some embodiments, the polynucleotide programmable nucleotide binding domain is a polynucleotide programmable DNA binding domain. In some embodiments, the base editor is a cytidine base editor (CBE). In some embodiments, the base editor is an adenine or adenosine base editor (ABE). In some embodiments, the base editor is an adenine or adenosine base editor (ABE) or a cytidine or cytosine base editor (CBE). In some embodiments, the base editor system (e.g., a base editor system comprising a cytidine deaminase) comprises a uracil glycosylase inhibitor or other agent or peptide (e.g., a uracil stabilizing protein such as provided in WO2022015969, the disclosure of which is incorporated herein by reference in its entirety for all purposes) that inhibits the inosine base excision repair system.

[0115] By “beta-2 microglobulin (β2M; B2M) polypeptide” is meant a protein having at least about 85% amino acid sequence identity to UniProt Accession No. P61769, which is provided below, or a fragment thereof having immunomodulatory activity.

>sp|P61769|B2MG_HUMAN Beta-2-microglobulin
OS = Homo sapiens OX = 9606 GN = B2M PE = 1 SV = 1
(SEQ ID NO: 455)
MSRSVALAVLALLSLSGLEAIQRTPKIQVYSRHPAENGKSNFLNCYVSGF
HPSDIEVDLLKNGERIEKVEHSDLSFSKDWSFYLLYYTEFTPTEKDEYAC
RVNHVTLSQPKIVKWDRDM.

[0116] By “beta-2-microglobulin (β2M; B2M) polynucleotide” is meant a nucleic acid molecule encoding an β2M polypeptide, as well as the introns, exons, 3′ untranslated regions, 5′ untranslated regions, and regulatory sequences associated with its expression, or fragments thereof. The beta-2-microglobulin gene encodes a serum protein associated with the major histocompatibility complex. β2M is involved in non-self recognition by host CD8+ T cells. An exemplary β2M polynucleotide sequence is provided at Genbank Accession No. DQ217933.1, which is provided below.

>DQ217933.1 Homo sapiens beta-2-microglobin (β2M) gene, complete cds
(SEQ ID NO: 456)
CATGTCATAAATGGTAAGTCCAAGAAAAATACAGGTATTCCCCCCCAAAGAAAACTGTAAAATC
GACTTTTTTCTATCTGTACTGTTTTTTATTGGTTTTTAAATTGGTTTTCCAAGTGAGTAAATCA
GAATCTATCTGTAATGGATTTTAAATTTAGTGTTTCTCTGTGATGTAGTAAACAAGAAACTAGA
GGCAAAAATAGCCCTGTCCCTTGCTAAACTTCTAAGGCACTTTTCTAGTACAACTCAACACTAA
CATTTCAGGCCTTTAGTGCCTTATATGAGTTTTTAAAAGGGGGAAAAGGGAGGGAGCAAGAGTG
TCTTAACTCATACATTTAGGCATAACAATTATTCTCATATTTTAGTTATTGAGAGGGCTGGTAG
AAAAACTAGGTAAATAATATTAATAATTATAGCGCTTATTAAACACTACAGAACACTTACTATG
TACCAGGCATTGTGGGAGGCTCTCTCTTGTGCATTATCTCATTTCATTAGGTCCATGGAGAGTA
TTGCATTTTCTTAGTTTAGGCATGGCCTCCACAATAAAGATTATCAAAAGCCTAAAAATATGTA
AAAGAAACCTAGAAGTTATTTGTTGTGCTCCTTGGGGAAGCTAGGCAAATCCTTTCAACTGAAA
ACCATGGTGACTTCCAAGATCTCTGCCCCTCCCCATCGCCATGGTCCACTTCCTCTTCTCACTG
TTCCTCTTAGAAAAGATCTGTGGACTCCACCACCACGAAATGGCGGCACCTTATTTATGGTCAC
TTTAGAGGGTAGGTTTTCTTAATGGGTCTGCCTGTCATGTTTAACGTCCTTGGCTGGGTCCAAG
GCAGATGCAGTCCAAACTCTCACTAAAATTGCCGAGCCCTTTGTCTTCCAGTGTCTAAAATATT
AATGTCAATGGAATCAGGCCAGAGTTTGAATTCTAGTCTCTTAGCCTTTGTTTCCCCTGTCCAT
AAAATGAATGGGGGTAATTCTTTCCTCCTACAGTTTATTTATATATTCACTAATTCATTCATTC
ATCCATCCATTCGTTCATTCGGTTTACTGAGTACCTACTATGTGCCAGCCCCTGTTCTAGGGTG
GAAACTAAGAGAATGATGTACCTAGAGGGCGCTGGAAGCTCTAAAGCCCTAGCAGTTACTGCTT
TTACTATTAGTGGTCGTTTTTTTCTCCCCCCCGCCCCCCGACAAATCAACAGAACAAAGAAAAT
TACCTAAACAGCAAGGACATAGGGAGGAACTTCTTGGCACAGAACTTTCCAAACACTTTTTCCT
GAAGGGATACAAGAAGCAAGAAAGGTACTCTTTCACTAGGACCTTCTCTGAGCTGTCCTCAGGA
TGCTTTTGGGACTATTTTTCTTACCCAGAGAATGGAGAAACCCTGCAGGGAATTCCCAAGCTGT
AGTTATAAACAGAAGTTCTCCTTCTGCTAGGTAGCATTCAAAGATCTTAATCTTCTGGGTTTCC
GTTTTCTCGAATGAAAAATGCAGGTCCGAGCAGTTAACTGGCTGGGGCACCATTAGCAAGTCAC
TTAGCATCTCTGGGGCCAGTCTGCAAAGCGAGGGGGCAGCCTTAATGTGCCTCCAGCCTGAAGT
CCTAGAATGAGCGCCCGGTGTCCCAAGCTGGGGCGCGCACCCCAGATCGGAGGGCGCCGATGTA
CAGACAGCAAACTCACCCAGTCTAGTGCATGCCTTCTTAAACATCACGAGACTCTAAGAAAAGG
AAACTGAAAACGGGAAAGTCCCTCTCTCTAACCTGGCACTGCGTCGCTGGCTTGGAGACAGGTG
ACGGTCCCTGCGGGCCTTGTCCTGATTGGCTGGGCACGCGTTTAATATAAGTGGAGGCGTCGCG
CTGGCGGGCATTCCTGAAGCTGACAGCATTCGGGCCGAGATGTCTCGCTCCGTGGCCTTAGCTG
TGCTCGCGCTACTCTCTCTTTCTGGCCTGGAGGCTATCCAGCGTGAGTCTCTCCTACCCTCCCG
CTCTGGTCCTTCCTCTCCCGCTCTGCACCCTCTGTGGCCCTCGCTGTGCTCTCTCGCTCCGTGA
CTTCCCTTCTCCAAGTTCTCCTTGGTGGCCCGCCGTGGGGCTAGTCCAGGGCTGGATCTCGGGG
AAGCGGCGGGGTGGCCTGGGAGTGGGGAAGGGGGTGCGCACCCGGGACGCGCGCTACTTGCCCC
TTTCGGCGGGGAGCAGGGGAGACCTTTGGCCTACGGCGACGGGAGGGTCGGGACAAAGTTTAGG
GCGTCGATAAGCGTCAGAGCGCCGAGGTTGGGGGAGGGTTTCTCTTCCGCTCTTTCGCGGGGCC
TCTGGCTCCCCCAGCGCAGCTGGAGTGGGGGACGGGTAGGCTCGTCCCAAAGGCGCGGCGCTGA
GGTTTGTGAACGCGTGGAGGGGCGCTTGGGGTCTGGGGGAGGCGTCGCCCGGGTAAGCCTGTCT
GCTGCGGCTCTGCTTCCCTTAGACTGGAGAGCTGTGGACTTCGTCTAGGCGCCCGCTAAGTTCG
CATGTCCTAGCACCTCTGGGTCTATGTGGGGCCACACCGTGGGGAGGAAACAGCACGCGACGTT
TGTAGAATGCTTGGCTGTGATACAAAGCGGTTTCGAATAATTAACTTATTTGTTCCCATCACAT
GTCACTTTTAAAAAATTATAAGAACTACCCGTTATTGACATCTTTCTGTGTGCCAAGGACTTTA
TGTGCTTTGCGTCATTTAATTTTGAAAACAGTTATCTTCCGCCATAGATAACTACTATGGTTAT
CTTCTGCCTCTCACAGATGAAGAAACTAAGGCACCGAGATTTTAAGAAACTTAATTACACAGGG
GATAAATGGCAGCAATCGAGATTGAAGTCAAGCCTAACCAGGGCTTTTGCGGGAGCGCATGCCT
TTTGGCTGTAATTCGTGCATTTTTTTTTAAGAAAAACGCCTGCCTTCTGCGTGAGATTCTCCAG
AGCAAACTGGGCGGCATGGGCCCTGTGGTCTTTTCGTACAGAGGGCTTCCTCTTTGGCTCTTTG
CCTGGTTGTTTCCAAGATGTACTGTGCCTCTTACTTTCGGTTTTGAAAACATGAGGGGGTTGGG
CGTGGTAGCTTACGCCTGTAATCCCAGCACTTAGGGAGGCCGAGGCGGGAGGATGGCTTGAGGT
CCGTAGTTGAGACCAGCCTGGCCAACATGGTGAAGCCTGGTCTCTACAAAAAATAATAACAAAA
ATTAGCCGGGTGTGGTGGCTCGTGCCTGTGGTCCCAGCTGCTCCGGTGGCTGAGGCGGGAGGAT
CTCTTGAGCTTAGGCTTTTGAGCTATCATGGCGCCAGTGCACTCCAGCGTGGGCAACAGAGCGA
GACCCTGTCTCTCAAAAAAGAAAAAAAAAAAAAAAGAAAGAGAAAAGAAAAGAAAGAAAGAAGT
GAAGGTTTGTCAGTCAGGGGAGCTGTAAAACCATTAATAAAGATAATCCAAGATGGTTACCAAG
ACTGTTGAGGACGCCAGAGATCTTGAGCACTTTCTAAGTACCTGGCAATACACTAAGCGCGCTC
ACCTTTTCCTCTGGCAAAACATGATCGAAAGCAGAATGTTTTGATCATGAGAAAATTGCATTTA
ATTTGAATACAATTTATTTACAACATAAAGGATAATGTATATATCACCACCATTACTGGTATTT
GCTGGTTATGTTAGATGTCATTTTAAAAAATAACAATCTGATATTTAAAAAAAAATCTTATTTT
GAAAATTTCCAAAGTAATACATGCCATGCATAGACCATTTCTGGAAGATACCACAAGAAACATG
TAATGATGATTGCCTCTGAAGGTCTATTTTCCTCCTCTGACCTGTGTGTGGGTTTTGTTTTTGT
TTTACTGTGGGCATAAATTAATTTTTCAGTTAAGTTTTGGAAGCTTAAATAACTCTCCAAAAGT
CATAAAGCCAGTAACTGGTTGAGCCCAAATTCAAACCCAGCCTGTCTGATACTTGTCCTCTTCT
TAGAAAAGATTACAGTGATGCTCTCACAAAATCTTGCCGCCTTCCCTCAAACAGAGAGTTCCAG
GCAGGATGAATCTGTGCTCTGATCCCTGAGGCATTTAATATGTTCTTATTATTAGAAGCTCAGA
TGCAAAGAGCTCTCTTAGCTTTTAATGTTATGAAAAAAATCAGGTCTTCATTAGATTCCCCAAT
CCACCTCTTGATGGGGCTAGTAGCCTTTCCTTAATGATAGGGTGTTTCTAGAGAGATATATCTG
GTCAAGGTGGCCTGGTACTCCTCCTTCTCCCCACAGCCTCCCAGACAAGGAGGAGTAGCTGCCT
TTTAGTGATCATGTACCCTGAATATAAGTGTATTTAAAAGAATTTTATACACATATATTTAGTG
TCAATCTGTATATTTAGTAGCACTAACACTTCTCTTCATTTTCAATGAAAAATATAGAGTTTAT
AATATTTTCTTCCCACTTCCCCATGGATGGTCTAGTCATGCCTCTCATTTTGGAAAGTACTGTT
TCTGAAACATTAGGCAATATATTCCCAACCTGGCTAGTTTACAGCAATCACCTGTGGATGCTAA
TTAAAACGCAAATCCCACTGTCACATGCATTACTCCATTTGATCATAATGGAAAGTATGTTCTG
TCCCATTTGCCATAGTCCTCACCTATCCCTGTTGTATTTTATCGGGTCCAACTCAACCATTTAA
GGTATTTGCCAGCTCTTGTATGCATTTAGGTTTTGTTTCTTTGTTTTTTAGCTCATGAAATTAG
GTACAAAGTCAGAGAGGGGTCTGGCATATAAAACCTCAGCAGAAATAAAGAGGTTTTGTTGTTT
GGTAAGAACATACCTTGGGTTGGTTGGGCACGGTGGCTCGTGCCTGTAATCCCAACACTTTGGG
AGGCCAAGGCAGGCTGATCACTTGAAGTTGGGAGTTCAAGACCAGCCTGGCCAACATGGTGAAA
TCCCGTCTCTACTGAAAATACAAAAATTAACCAGGCATGGTGGTGTGTGCCTGTAGTCCCAGGA
ATCACTTGAACCCAGGAGGCGGAGGTTGCAGTGAGCTGAGATCTCACCACTGCACACTGCACTC
CAGCCTGGGCAATGGAATGAGATTCCATCCCAAAAAATAAAAAAATAAAAAAATAAAGAACATA
CCTTGGGTTGATCCACTTAGGAACCTCAGATAATAACATCTGCCACGTATAGAGCAATTGCTAT
GTCCCAGGCACTCTACTAGACACTTCATACAGTTTAGAAAATCAGATGGGTGTAGATCAAGGCA
GGAGCAGGAACCAAAAAGAAAGGCATAAACATAAGAAAAAAAATGGAAGGGGTGGAAACAGAGT
ACAATAACATGAGTAATTTGATGGGGGCTATTATGAACTGAGAAATGAACTTTGAAAAGTATCT
TGGGGCCAAATCATGTAGACTCTTGAGTGATGTGTTAAGGAATGCTATGAGTGCTGAGAGGGCA
TCAGAAGTCCTTGAGAGCCTCCAGAGAAAGGCTCTTAAAAATGCAGCGCAATCTCCAGTGACAG
AAGATACTGCTAGAAATCTGCTAGAAAAAAAACAAAAAAGGCATGTATAGAGGAATTATGAGGG
AAAGATACCAAGTCACGGTTTATTCTTCAAAATGGAGGTGGCTTGTTGGGAAGGTGGAAGCTCA
TTTGGCCAGAGTGGAAATGGAATTGGGAGAAATCGATGACCAAATGTAAACACTTGGTGCCTGA
TATAGCTTGACACCAAGTTAGCCCCAAGTGAAATACCCTGGCAATATTAATGTGTCTTTTCCCG
ATATTCCTCAGGTACTCCAAAGATTCAGGTTTACTCACGTCATCCAGCAGAGAATGGAAAGTCA
AATTTCCTGAATTGCTATGTGTCTGGGTTTCATCCATCCGACATTGAAGTTGACTTACTGAAGA
ATGGAGAGAGAATTGAAAAAGTGGAGCATTCAGACTTGTCTTTCAGCAAGGACTGGTCTTTCTA
TCTCTTGTACTACACTGAATTCACCCCCACTGAAAAAGATGAGTATGCCTGCCGTGTGAACCAT
GTGACTTTGTCACAGCCCAAGATAGTTAAGTGGGGTAAGTCTTACATTCTTTTGTAAGCTGCTG
AAAGTTGTGTATGAGTAGTCATATCATAAAGCTGCTTTGATATAAAAAAGGTCTATGGCCATAC
TACCCTGAATGAGTCCCATCCCATCTGATATAAACAATCTGCATATTGGGATTGTCAGGGAATG
TTCTTAAAGATCAGATTAGTGGCACCTGCTGAGATACTGATGCACAGCATGGTTTCTGAACCAG
TAGTTTCCCTGCAGTTGAGCAGGGAGCAGCAGCAGCACTTGCACAAATACATATACACTCTTAA
CACTTCTTACCTACTGGCTTCCTCTAGCTTTTGTGGCAGCTTCAGGTATATTTAGCACTGAACG
AACATCTCAAGAAGGTATAGGCCTTTGTTTGTAAGTCCTGCTGTCCTAGCATCCTATAATCCTG
GACTTCTCCAGTACTTTCTGGCTGGATTGGTATCTGAGGCTAGTAGGAAGGGCTTGTTCCTGCT
GGGTAGCTCTAAACAATGTATTCATGGGTAGGAACAGCAGCCTATTCTGCCAGCCTTATTTCTA
ACCATTTTAGACATTTGTTAGTACATGGTATTTTAAAAGTAAAACTTAATGTCTTCCTTTTTTT
TCTCCACTGTCTTTTTCATAGATCGAGACATGTAAGCAGCATCATGGAGGTAAGTTTTTGACCT
TGAGAAAATGTTTTTGTTTCACTGTCCTGAGGACTATTTATAGACAGCTCTAACATGATAACCC
TCACTATGTGGAGAACATTGACAGAGTAACATTTTAGCAGGGAAAGAAGAATCCTACAGGGTCA
TGTTCCCTTCTCCTGTGGAGTGGCATGAAGAAGGTGTATGGCCCCAGGTATGGCCATATTACTG
ACCCTCTACAGAGAGGGCAAAGGAACTGCCAGTATGGTATTGCAGGATAAAGGCAGGTGGTTAC
CCACATTACCTGCAAGGCTTTGATCTTTCTTCTGCCATTTCCACATTGGACATCTCTGCTGAGG
AGAGAAAATGAACCACTCTTTTCCTTTGTATAATGTTGTTTTATTCTTCAGACAGAAGAGAGGA
GTTATACAGCTCTGCAGACATCCCATTCCTGTATGGGGACTGTGTTTGCCTCTTAGAGGTTCCC
AGGCCACTAGAGGAGATAAAGGGAAACAGATTGTTATAACTTGATATAATGATACTATAATAGA
TGTAACTACAAGGAGCTCCAGAAGCAAGAGAGAGGGAGGAACTTGGACTTCTCTGCATCTTTAG
TTGGAGTCCAAAGGCTTTTCAATGAAATTCTACTGCCCAGGGTACATTGATGCTGAAACCCCAT
TCAAATCTCCTGTTATATTCTAGAACAGGGAATTGATTTGGGAGAGCATCAGGAAGGTGGATGA
TCTGCCCAGTCACACTGTTAGTAAATTGTAGAGCCAGGACCTGAACTCTAATATAGTCATGTGT
TACTTAATGACGGGGACATGTTCTGAGAAATGCTTACACAAACCTAGGTGTTGTAGCCTACTAC
ACGCATAGGCTACATGGTATAGCCTATTGCTCCTAGACTACAAACCTGTACAGCCTGTTACTGT
ACTGAATACTGTGGGCAGTTGTAACACAATGGTAAGTATTTGTGTATCTAAACATAGAAGTTGC
AGTAAAAATATGCTATTTTAATCTTATGAGACCACTGTCATATATACAGTCCATCATTGACCAA
AACATCATATCAGCATTTTTTCTTCTAAGATTTTGGGAGCACCAAAGGGATACACTAACAGGAT
ATACTCTTTATAATGGGTTTGGAGAACTGTCTGCAGCTACTTCTTTTAAAAAGGTGATCTACAC
AGTAGAAATTAGACAAGTTTGGTAATGAGATCTGCAATCCAAATAAAATAAATTCATTGCTAAC
CTTTTTCTTTTCTTTTCAGGTTTGAAGATGCCGCATTTGGATTGGATGAATTCCAAATTCTGCT
TGCTTGCTTTTTAATATTGATATGCTTATACACTTACACTTTATGCACAAAATGTAGGGTTATA
ATAATGTTAACATGGACATGATCTTCTTTATAATTCTACTTTGAGTGCTGTCTCCATGTTTGAT
GTATCTGAGCAGGTTGCTCCACAGGTAGCTCTAGGAGGGCTGGCAACTTAGAGGTGGGGAGCAG
AGAATTCTCTTATCCAACATCAACATCTTGGTCAGATTTGAACTCTTCAATCTCTTGCACTCAA
AGCTTGTTAAGATAGTTAAGCGTGCATAAGTTAACTTCCAATTTACATACTCTGCTTAGAATTT
GGGGGAAAATTTAGAAATATAATTGACAGGATTATTGGAAATTTGTTATAATGAATGAAACATT
TTGTCATATAAGATTCATATTTACTTCTTATACATTTGATAAAGTAAGGCATGGTTGTGGTTAA
TCTGGTTTATTTTTGTTCCACAAGTTAAATAAATCATAAAACTTGATGTGTTATCTCTTATATC
TCACTCCCACTATTACCCCTTTATTTTCAAACAGGGAAACAGTCTTCAAGTTCCACTTGGTAAA
AAATGTGAACCCCTTGTATATAGAGTTTGGCTCACAGTGTAAAGGGCCTCAGTGATTCACATTT
TCCAGATTAGGAATCTGATGCTCAAAGAAGTTAAATGGCATAGTTGGGGTGACACAGCTGTCTA
GTGGGAGGCCAGCCTTCTATATTTTAGCCAGCGTTCTTTCCTGCGGGCCAGGTCATGAGGAGTA
TGCAGACTCTAAGAGGGAGCAAAAGTATCTGAAGGATTTAATATTTTAGCAAGGAATAGATATA
CAATCATCCCTTGGTCTCCCTGGGGGATTGGTTTCAGGACCCCTTCTTGGACACCAAATCTATG
GATATTTAAGTCCCTTCTATAAAATGGTATAGTATTTGCATATAACCTATCCACATCCTCCTGT
ATACTTTAAATCATTTCTAGATTACTTGTAATACCTAATACAATGTAAATGCTATGCAAATAGT
TGTTATTGTTTAAGGAATAATGACAAGAAAAAAAAGTCTGTACATGCTCAGTAAAGACACAACC
ATCCCTTTTTTTCCCCAGTGTTTTTGATCCATGGTTTGCTGAATCCACAGATGTGGAGCCCCTG
GATACGGAAGGCCCGCTGTACTTTGAATGACAAATAACAGATTTAAA.

[0117] The term “Cas9” or “Cas9 domain” refers to an RNA guided nuclease comprising a Cas9 protein, or a fragment thereof (e.g., a protein comprising an active, inactive, or partially active DNA cleavage domain of Cas9, and/or the gRNA binding domain of Cas9). A Cas9 nuclease is also referred to sometimes as a casnl nuclease or a CRISPR (clustered regularly interspaced short palindromic repeat) associated nuclease.

[0118] By “chimeric antigen receptor” or “CAR” is meant a synthetic or engineered receptor comprising an extracellular antigen binding domain joined to one or more intracellular signaling domains (e.g., T cell signaling domain) that confers specificity for an antigen onto an immune effector cell (e.g., a T-cell, an NK cell, or a macrophage). In embodiments, the CAR is a SUPRA CAR, an anti-tag CAR, a TCR-CAR, or a TCR-like CAR (see, e.g., Guedan, et al. “Engineering and Design of Chimeric Antigen Receptors,” Methods and Clinical Development, 12:145-156 (2019); Poorebrahim, et al., “TCR-like CARs and TCR-CARs targeting neoepitopes: an emerging potential,” Cancer Gene Therapy, 28:581-589 (2021); and Minutolo, et al. “The Emergence of Universal Immune Receptor T Cell Therapy for Cancer,” Front Oncol., 9:176 (2019), the disclosures of which are incorporated herein by reference in their entireties for all purposes).

[0119] By “chimeric antigen receptor (CAR) T cell” or “CAR-T cell” is meant a T cell expressing a CAR that has antigen specificity determined by the antibody-derived targeting domain of the CAR. As used herein, “CAR-T cells” includes T cells, regulatory T cells (TREG), or NK cells. As used herein, “CAR-T cells” include cells engineered to express a CAR or a T cell receptor (TCR, sometimes referred to as TCR-CARs or TCR-like CARs). Methods of making CARs (e.g., for treatment of cancer) are publicly available (see, e.g., Park et al., Trends Biotechnol., 29:550-557, 2011; Grupp et al., N Engl J Med., 368:1509-1518, 2013; Han et al., J. Hematol Oncol. 6:47, 2013; Haso et al., (2013) Blood, 121, 1165-1174; Mohseni, et al., (2020) Front. Immunol., 11, art. 1608, doi: 10.3389/fimmu.2020.01608; Eggenhuizen, et al. Int. J. Mol. Sci. (2020), 21:7015, doi: 10.3390/ijms21197015; Poorebrahim, et al., Cancer Gene Ther 28, 581-589 (2021), https://doi.org/10.1038/s41417-021-00307-7, PCT Pubs. WO2012/079000, WO2013/059593; and U.S. Pub. 2012/0213783, the disclosure of each of which is incorporated herein by reference herein in its entirety).

[0120] By “class II, major histocompatibility complex, transactivator (CIITA) polypeptide” is meant a protein having at least about 85% amino acid sequence identity to NCBI Accession No. NP_001273331.1, which is provided below, or a fragment thereof having DNA binding activity.

>NP_001273331.1 MHC class II transactivator
isoform 1 [Homo sapiens]
(SEQ ID NO: 457)
MRCLAPRPAGSYLSEPQGSSQCATMELGPLEGGYLELLNSDADPLCLYH
FYDQMDLAGEEEIELYSEPDTDTINCDQFSRLLCDMEGDEETREAYANI
AELDQYVFQDSQLEGLSKDIFIEHIGPDEVIGESMEMPAEVGQKSQKRP
FPEELPADLKHWKPAEPPTVVTGSLLVGPVSDCSTLPCLPLPALFNOEP
ASGQMRLEKTDQIPMPFSSSSLSCLNLPEGPIQFVPTISTLPHGLWQIS
EAGTGVSSIFIYHGEVPQASQVPPPSGFTVHGLPTSPDRPGSTSPFAPS
ATDLPSMPEPALTSRANMTEHKTSPTQCPAAGEVSNKLPKWPEPVEQFY
RSLQDTYGAEPAGPDGILVEVDLVQARLERSSSKSLERELATPDWAERQ
LAQGGLAEVLLAAKEHRRPRETRVIAVLGKAGQGKSYWAGAVSRAWACG
RLPQYDFVFSVPCHCLNRPGDAYGLQDLLFSLGPQPLVAADEVFSHILK
RPDRVLLILDGFEELEAQDGFLHSTCGPAPAEPCSLRGLLAGLFQKKLL
RGCTLLLTARPRGRLVQSLSKADALFELSGFSMEQAQAYVMRYFESSGM
TEHQDRALTLLRDRPLLLSHSHSPTLCRAVCOLSEALLELGEDAKLPST
LTGLYVGLLGRAALDSPPGALAELAKLAWELGRRHQSTLQEDQFPSADV
RTWAMAKGLVQHPPRAAESELAFPSFLLQCFLGALWLALSGEIKDKELP
QYLALTPRKKRPYDNWLEGVPRFLAGLIFQPPARCLGALLGPSAAASVD
RKQKVLARYLKRLQPGTLRARQLLELLHCAHEAEEAGIWQHVVQELPGR
LSFLGTRLTPPDAHVLGKALEAAGQDFSLDLRSTGICPSGLGSLVGLSC
VTRFRAALSDTVALWESLQQHGETKLLQAAEEKFTIEPFKAKSLKDVED
LGKLVQTQRTRSSSEDTAGELPAVRDLKKLEFALGPVSGPQAFPKLVRI
LTAFSSLQHLDLDALSENKIGDEGVSQLSATFPQLKSLETLNLSQNNIT
DLGAYKLAEALPSLAASLLRLSLYNNCICDVGAESLARVLPDMVSLRVM
DVQYNKFTAAGAQQLAASLRRCPHVETLAMWTPTIPFSVQEHLQQQDSR
ISLR.

[0121] By “class II, major histocompatibililty complex, transactivator (CIITA) polynucleotide” is meant a nucleic acid molecule encoding an CIITA polypeptide, as well as the introns, exons, 3′ untranslated regions, 5′ untranslated regions, and regulatory sequences associated with its expression, or fragments thereof. An exemplary CIITA polynucleotide is provided at NCBI Accession No. NM_001286402.1, which is provide below.

>NM_001286402.1 Homo sapiens class II major histocompatibility complex
transactivator (CIITA), transcript variant 1, mRNA
(SEQ ID NO: 458)
GGTTAGTGATGAGGCTAGTGATGAGGCTGTGTGCTTCTGAGCTGGGCATCCGAAGGCATCCTTG
GGGAAGCTGAGGGCACGAGGAGGGGCTGCCAGACTCCGGGAGCTGCTGCCTGGCTGGGATTCCT
ACACAATGCGTTGCCTGGCTCCACGCCCTGCTGGGTCCTACCTGTCAGAGCCCCAAGGCAGCTC
ACAGTGTGCCACCATGGAGTTGGGGCCCCTAGAAGGTGGCTACCTGGAGCTTCTTAACAGCGAT
GCTGACCCCCTGTGCCTCTACCACTTCTATGACCAGATGGACCTGGCTGGAGAAGAAGAGATTG
AGCTCTACTCAGAACCCGACACAGACACCATCAACTGCGACCAGTTCAGCAGGCTGTTGTGTGA
CATGGAAGGTGATGAAGAGACCAGGGAGGCTTATGCCAATATCGCGGAACTGGACCAGTATGTC
TTCCAGGACTCCCAGCTGGAGGGCCTGAGCAAGGACATTTTCATAGAGCACATAGGACCAGATG
AAGTGATCGGTGAGAGTATGGAGATGCCAGCAGAAGTTGGGCAGAAAAGTCAGAAAAGACCCTT
CCCAGAGGAGCTTCCGGCAGACCTGAAGCACTGGAAGCCAGCTGAGCCCCCCACTGTGGTGACT
GGCAGTCTCCTAGTGGGACCAGTGAGCGACTGCTCCACCCTGCCCTGCCTGCCACTGCCTGCGC
TGTTCAACCAGGAGCCAGCCTCCGGCCAGATGCGCCTGGAGAAAACCGACCAGATTCCCATGCC
TTTCTCCAGTTCCTCGTTGAGCTGCCTGAATCTCCCTGAGGGACCCATCCAGTTTGTCCCCACC
ATCTCCACTCTGCCCCATGGGCTCTGGCAAATCTCTGAGGCTGGAACAGGGGTCTCCAGTATAT
TCATCTACCATGGTGAGGTGCCCCAGGCCAGCCAAGTACCCCCTCCCAGTGGATTCACTGTCCA
CGGCCTCCCAACATCTCCAGACCGGCCAGGCTCCACCAGCCCCTTCGCTCCATCAGCCACTGAC
CTGCCCAGCATGCCTGAACCTGCCCTGACCTCCCGAGCAAACATGACAGAGCACAAGACGTCCC
CCACCCAATGCCCGGCAGCTGGAGAGGTCTCCAACAAGCTTCCAAAATGGCCTGAGCCGGTGGA
GCAGTTCTACCGCTCACTGCAGGACACGTATGGTGCCGAGCCCGCAGGCCCGGATGGCATCCTA
GTGGAGGTGGATCTGGTGCAGGCCAGGCTGGAGAGGAGCAGCAGCAAGAGCCTGGAGCGGGAAC
TGGCCACCCCGGACTGGGCAGAACGGCAGCTGGCCCAAGGAGGCCTGGCTGAGGTGCTGTTGGC
TGCCAAGGAGCACCGGCGGCCGCGTGAGACACGAGTGATTGCTGTGCTGGGCAAAGCTGGTCAG
GGCAAGAGCTATTGGGCTGGGGCAGTGAGCCGGGCCTGGGCTTGTGGCCGGCTTCCCCAGTACG
ACTTTGTCTTCTCTGTCCCCTGCCATTGCTTGAACCGTCCGGGGGATGCCTATGGCCTGCAGGA
TCTGCTCTTCTCCCTGGGCCCACAGCCACTCGTGGCGGCCGATGAGGTTTTCAGCCACATCTTG
AAGAGACCTGACCGCGTTCTGCTCATCCTAGACGGCTTCGAGGAGCTGGAAGCGCAAGATGGCT
TCCTGCACAGCACGTGCGGACCGGCACCGGCGGAGCCCTGCTCCCTCCGGGGGCTGCTGGCCGG
CCTTTTCCAGAAGAAGCTGCTCCGAGGTTGCACCCTCCTCCTCACAGCCCGGCCCCGGGGCCGC
CTGGTCCAGAGCCTGAGCAAGGCCGACGCCCTATTTGAGCTGTCCGGCTTCTCCATGGAGCAGG
CCCAGGCATACGTGATGCGCTACTTTGAGAGCTCAGGGATGACAGAGCACCAAGACAGAGCCCT
GACGCTCCTCCGGGACCGGCCACTTCTTCTCAGTCACAGCCACAGCCCTACTTTGTGCCGGGCA
GTGTGCCAGCTCTCAGAGGCCCTGCTGGAGCTTGGGGAGGACGCCAAGCTGCCCTCCACGCTCA
CGGGACTCTATGTCGGCCTGCTGGGCCGTGCAGCCCTCGACAGCCCCCCCGGGGCCCTGGCAGA
GCTGGCCAAGCTGGCCTGGGAGCTGGGCCGCAGACATCAAAGTACCCTACAGGAGGACCAGTTC
CCATCCGCAGACGTGAGGACCTGGGCGATGGCCAAAGGCTTAGTCCAACACCCACCGCGGGCCG
CAGAGTCCGAGCTGGCCTTCCCCAGCTTCCTCCTGCAATGCTTCCTGGGGGCCCTGTGGCTGGC
TCTGAGTGGCGAAATCAAGGACAAGGAGCTCCCGCAGTACCTAGCATTGACCCCAAGGAAGAAG
AGGCCCTATGACAACTGGCTGGAGGGCGTGCCACGCTTTCTGGCTGGGCTGATCTTCCAGCCTC
CCGCCCGCTGCCTGGGAGCCCTACTCGGGCCATCGGCGGCTGCCTCGGTGGACAGGAAGCAGAA
GGTGCTTGCGAGGTACCTGAAGCGGCTGCAGCCGGGGACACTGCGGGCGCGGCAGCTGCTGGAG
CTGCTGCACTGCGCCCACGAGGCCGAGGAGGCTGGAATTTGGCAGCACGTGGTACAGGAGCTCC
CCGGCCGCCTCTCTTTTCTGGGCACCCGCCTCACGCCTCCTGATGCACATGTACTGGGCAAGGC
CTTGGAGGCGGCGGGCCAAGACTTCTCCCTGGACCTCCGCAGCACTGGCATTTGCCCCTCTGGA
TTGGGGAGCCTCGTGGGACTCAGCTGTGTCACCCGTTTCAGGGCTGCCTTGAGCGACACGGTGG
CGCTGTGGGAGTCCCTGCAGCAGCATGGGGAGACCAAGCTACTTCAGGCAGCAGAGGAGAAGTT
CACCATCGAGCCTTTCAAAGCCAAGTCCCTGAAGGATGTGGAAGACCTGGGAAAGCTTGTGCAG
ACTCAGAGGACGAGAAGTTCCTCGGAAGACACAGCTGGGGAGCTCCCTGCTGTTCGGGACCTAA
AGAAACTGGAGTTTGCGCTGGGCCCTGTCTCAGGCCCCCAGGCTTTCCCCAAACTGGTGCGGAT
CCTCACGGCCTTTTCCTCCCTGCAGCATCTGGACCTGGATGCGCTGAGTGAGAACAAGATCGGG
GACGAGGGTGTCTCGCAGCTCTCAGCCACCTTCCCCCAGCTGAAGTCCTTGGAAACCCTCAATC
TGTCCCAGAACAACATCACTGACCTGGGTGCCTACAAACTCGCCGAGGCCCTGCCTTCGCTCGC
TGCATCCCTGCTCAGGCTAAGCTTGTACAATAACTGCATCTGCGACGTGGGAGCCGAGAGCTTG
GCTCGTGTGCTTCCGGACATGGTGTCCCTCCGGGTGATGGACGTCCAGTACAACAAGTTCACGG
CTGCCGGGGCCCAGCAGCTCGCTGCCAGCCTTCGGAGGTGTCCTCATGTGGAGACGCTGGCGAT
GTGGACGCCCACCATCCCATTCAGTGTCCAGGAACACCTGCAACAACAGGATTCACGGATCAGC
CTGAGATGATCCCAGCTGTGCTCTGGACAGGCATGTTCTCTGAGGACACTAACCACGCTGGACC
TTGAACTGGGTACTTGTGGACACAGCTCTTCTCCAGGCTGTATCCCATGAGCCTCAGCATCCTG
GCACCCGGCCCCTGCTGGTTCAGGGTTGGCCCCTGCCCGGCTGCGGAATGAACCACATCTTGCT
CTGCTGACAGACACAGGCCCGGCTCCAGGCTCCTTTAGCGCCCAGTTGGGTGGATGCCTGGTGG
CAGCTGCGGTCCACCCAGGAGCCCCGAGGCCTTCTCTGAAGGACATTGCGGACAGCCACGGCCA
GGCCAGAGGGAGTGACAGAGGCAGCCCCATTCTGCCTGCCCAGGCCCCTGCCACCCTGGGGAGA
AAGTACTTCTTTTTTTTTATTTTTAGACAGAGTCTCACTGTTGCCCAGGCTGGCGTGCAGTGGT
GCGATCTGGGTTCACTGCAACCTCCGCCTCTTGGGTTCAAGCGATTCTTCTGCTTCAGCCTCCC
GAGTAGCTGGGACTACAGGCACCCACCATCATGTCTGGCTAATTTTTCATTTTTAGTAGAGACA
GGGTTTTGCCATGTTGGCCAGGCTGGTCTCAAACTCTTGACCTCAGGTGATCCACCCACCTCAG
CCTCCCAAAGTGCTGGGATTACAAGCGTGAGCCACTGCACCGGGCCACAGAGAAAGTACTTCTC
CACCCTGCTCTCCGACCAGACACCTTGACAGGGCACACCGGGCACTCAGAAGACACTGATGGGC
AACCCCCAGCCTGCTAATTCCCCAGATTGCAACAGGCTGGGCTTCAGTGGCAGCTGCTTTTGTC
TATGGGACTCAATGCACTGACATTGTTGGCCAAAGCCAAAGCTAGGCCTGGCCAGATGCACCAG
CCCTTAGCAGGGAAACAGCTAATGGGACACTAATGGGGCGGTGAGAGGGGAACAGACTGGAAGC
ACAGCTTCATTTCCTGTGTCTTTTTTCACTACATTATAAATGTCTCTTTAATGTCACAGGCAGG
TCCAGGGTTTGAGTTCATACCCTGTTACCATTTTGGGGTACCCACTGCTCTGGTTATCTAATAT
GTAACAAGCCACCCCAAATCATAGTGGCTTAAAACAACACTCACATTTA.

[0122] By “Cluster of Differentiation 47 (CD47) polypeptide” is meant a protein having at least about 85% amino acid sequence identity to NCBI Accession No. NP_001768.1, which is provided below, or a fragment thereof having immunomodulatory activity.

| (SEQ ID NO: 459) | |
|---|---|
| 1 | mwplvaalll gsaccgsaql lfnktksvef tfcndtvvip cfvtnmeaqn ttevyvkwkf |
| 61 | kgrdiytfdg alnkstvptd fssakievsq llkgdaslkm dksdavshtg nytcevtelt |
| 121 | regetiielk yrvvswfspn enilivifpi faillfwgqf giktlkyrsg gmdektiall |
| 181 | vaglvitviv ivgailfvpg eyslknatgl glivtstgil illhyyvfst aigltsfvia |
| 241 | ilviqviayi lavvglslci aacipmhgpl lisglsilal aqllglvymk fvasnaktiq |
| 301 | pprkaveepl nafkeskgmm nde. |

[0123] By “Cluster of Differentiation 47 (CD47) polynucleotide” is meant a nucleic acid molecule encoding an CD47 polypeptide, as well as the introns, exons, 3′ untranslated regions, 5′ untranslated regions, and regulatory sequences associated with its expression, or fragments thereof. An exemplary CD47 polynucleotide is provided at NCBI Accession No. NM_001777.4, which is provided below.

| (SEQ ID NO: 460) | |
|---|---|
| 1 | gcagcctggg cagtgggtcc tgcctgtgac gcgcggcggc ggtcggtcct gcctgtaacg |
| 61 | gcggcggcgg ctgctgctcc ggacacctgc ggcggcggcg gcgaccccgc ggcgggcgcg |
| 121 | gagatgtggc ccctggtagc ggcgctgttg ctgggctcgg cgtgctgcgg atcagctcag |
| 181 | ctactattta ataaaacaaa atctgtagaa ttcacgtttt gtaatgacac tgtcgtcatt |
| 241 | ccatgctttg ttactaatat ggaggcacaa aacactactg aagtatacgt aaagtggaaa |
| 301 | tttaaaggaa gagatattta cacctttgat ggagctctaa acaagtccac tgtccccact |
| 361 | gactttagta gtgcaaaaat tgaagtctca caattactaa aaggagatgc ctctttgaag |
| 421 | atggataaga gtgatgctgt ctcacacaca ggaaactaca cttgtgaagt aacagaatta |
| 481 | accagagaag gtgaaacgat catcgagcta aaatatcgtg ttgtttcatg gttttctcca |
| 541 | aatgaaaata ttcttattgt tattttccca atttttgcta tactcctgtt ctggggacag |
| 601 | tttggtatta aaacacttaa atatagatcc ggtggtatgg atgagaaaac aattgcttta |
| 661 | cttgttgctg gactagtgat cactgtcatt gtcattgttg gagccattct tttcgtccca |
| 721 | ggtgaatatt cattaaagaa tgctactggc cttggtttaa ttgtgacttc tacagggata |
| 781 | ttaatattac ttcactacta tgtgtttagt acagcgattg gattaacctc cttcgtcatt |
| 841 | gccatattgg ttattcaggt gatagcctat atcctcgctg tggttggact gagtctctgt |
| 901 | attgcggcgt gtataccaat gcatggccct cttctgattt caggtttgag tatcttagct |
| 961 | ctagcacaat tacttggact agtttatatg aaatttgtgg cttccaatca gaagactata |
| 1021 | caacctccta ggaaagctgt agaggaaccc cttaatgcat tcaaagaatc aaaaggaatg |
| 1081 | atgaatgatg aataactgaa gtgaagtgat ggactccgat ttggagagta gtaagacgtg |
| 1141 | aaaggaatac acttgtgttt aagcaccatg gccttgatga ttcactgttg gggagaagaa |
| 1201 | acaagaaaag taactggttg tcacctatga gacccttacg tgattgttag ttaagttttt |
| 1261 | attcaaagca gctgtaattt agttaataaa ataattatga tctatgttgt ttgcccaatt |
| 1321 | gagatccagt tttttgttgt tatttttaat caattagggg caatagtaga atggacaatt |
| 1381 | tccaagaatg atgcctttca ggtcctaggg cctctggcct ctaggtaacc agtttaaatt |
| 1441 | ggttcagggt gataactact tagcactgcc ctggtgatta cccagagata tctatgaaaa |
| 1501 | ccagtggctt ccatcaaacc tttgccaact caggttcaca gcagctttgg gcagttatgg |
| 1561 | cagtatggca ttagctgaga ggtgtctgcc acttctgggt caatggaata ataaattaag |
| 1621 | tacaggcagg aatttggttg ggagcatctt gtatgatctc cgtatgatgt gatattgatg |
| 1681 | gagatagtgg tcctcattct tgggggttgc cattcccaca ttcccccttc aacaaacagt |
| 1741 | gtaacaggtc cttcccagat ttagggtact tttattgatg gatatgtttt ccttttattc |
| 1801 | acataacccc ttgaaaccct gtcttgtcct cctgttactt gcttctgctg tacaagatgt |
| 1861 | agcacctttt ctcctctttg aacatggtct agtgacacgg tagcaccagt tgcaggaagg |
| 1921 | agccagactt gttctcagag cactgtgttc acacttttca gcaaaaatag ctatggttgt |
| 1981 | aacatatgta ttcccttcct ctgatttgaa ggcaaaaatc tacagtgttt cttcacttct |
| 2041 | tttctgatct ggggcatgaa aaaagcaaga ttgaaatttg aactatgagt ctcctgcatg |
| 2101 | gcaacaaaat gtgtgtcacc atcaggccaa caggccagcc cttgaatggg gatttattac |
| 2161 | tgttgtatct atgttgcatg ataaacattc atcaccttcc tcctgtagtc ctgcctcgta |
| 2221 | ctccccttcc cctatgattg aaaagtaaac aaaacccaca tttcctatcc tggttagaag |
| 2281 | aaaattaatg ttctgacagt tgtgatcgcc tggagtactt ttagactttt agcattcgtt |
| 2341 | ttttacctgt ttgtggatgt gtgtttgtat gtgcatacgt atgagatagg cacatgcatc |
| 2401 | ttctgtatgg acaaaggtgg ggtacctaca ggagagcaaa ggttaatttt gtgcttttag |
| 2461 | taaaaacatt taaatacaaa gttctttatt gggtggaatt atatttgatg caaatatttg |
| 2521 | atcacttaaa acttttaaaa cttctaggta atttgccacg ctttttgact gctcaccaat |
| 2581 | accctgtaaa aatacgtaat tcttcctgtt tgtgtaataa gatattcata tttgtagttg |
| 2641 | cattaataat agttatttct tagtccatca gatgttcccg tgtgcctctt ttatgccaaa |
| 2701 | ttgattgtca tatttcatgt tgggaccaag tagtttgccc atggcaaacc taaatttatg |
| 2761 | acctgctgag gcctctcaga aaactgagca tactagcaag acagctcttc ttgaaaaaaa |
| 2821 | aaatatgtat acacaaatat atacgtatat ctatatatac gtatgtatat acacacatgt |
| 2881 | atattcttcc ttgattgtgt agctgtccaa aataataaca tatatagagg gagctgtatt |
| 2941 | cctttataca aatctgatgg ctcctgcagc actttttcct tctgaaaata tttacatttt |
| 3001 | gctaacctag tttgttactt taaaaatcag ttttgatgaa aggagggaaa agcagatgga |
| 3061 | cttgaaaaag atccaagctc ctattagaaa aggtatgaaa atctttatag taaaattttt |
| 3121 | tataaactaa agttgtacct tttaatatgt agtaaactct catttatttg gggttcgctc |
| 3181 | ttggatctca tccatccatt gtgttctctt taatgctgcc tgccttttga ggcattcact |
| 3241 | gccctagaca atgccaccag agatagtggg ggaaatgcca gatgaaacca actcttgctc |
| 3301 | tcactagttg tcagcttctc tggataagtg accacagaag caggagtcct cctgcttggg |
| 3361 | catcattggg ccagttcctt ctctttaaat cagatttgta atggctccca aattccatca |
| 3421 | catcacattt aaattgcaga cagtgttttg cacatcatgt atctgttttg tcccataata |
| 3481 | tgctttttac tccctgatcc cagtttctgc tgttgactct tccattcagt tttatttatt |
| 3541 | gtgtgttctc acagtgacac catttgtcct tttctgcaac aacctttcca gctacttttg |
| 3601 | ccaaattcta tttgtcttct ccttcaaaac attctccttt gcagttcctc ttcatctgtg |
| 3661 | tagctgctct tttgtctctt aacttaccat tcctatagta ctttatgcat ctctgcttag |
| 3721 | ttctattagt tttttggcct tgctcttctc cttgatttta aaattccttc tatagctaga |
| 3781 | gcttttcttt ctttcattct ctcttcctgc agtgttttgc atacatcaga agctaggtac |
| 3841 | ataagttaaa tgattgagag ttggctgtat ttagatttat cactttttaa tagggtgagc |
| 3901 | ttgagagttt tctttctttc tgtttttttt ttttgttttt tttttttttt tttttttttt |
| 3961 | tttttttgac taatttcaca tgctctaaaa accttcaaag gtgattattt ttctcctgga |
| 4021 | aactccaggt ccattctgtt taaatcccta agaatgtcag aattaaaata acagggctat |
| 4081 | cccgtaattg gaaatatttc ttttttcagg atgctatagt caatttagta agtgaccacc |
| 4141 | aaattgttat ttgcactaac aaagctcaaa acacgataag tttactcctc catctcagta |
| 4201 | ataaaaatta agctgtaatc aaccttctag gtttctcttg tcttaaaatg ggtattcaaa |
| 4261 | aatggggatc tgtggtgtat gtatggaaac acatactcct taatttacct gttgttggaa |
| 4321 | actggagaaa tgattgtcgg gcaaccgttt attttttatt gtattttatt tggttgaggg |
| 4381 | atttttttat aaacagtttt acttgtgtca tattttaaaa ttactaactg ccatcacctg |
| 4441 | ctggggtcct ttgttaggtc attttcagtg actaataggg ataatccagg taactttgaa |
| 4501 | gagatgagca gtgagtgacc aggcagtttt tctgccttta gctttgacag ttcttaatta |
| 4561 | agatcattga agaccagctt tctcataaat ttctcttttt gaaaaaaaga aagcatttgt |
| 4621 | actaagctcc tctgtaagac aacatcttaa atcttaaaag tgttgttatc atgactggtg |
| 4681 | agagaagaaa acattttgtt tttattaaat ggagcattat ttacaaaaag ccattgttga |
| 4741 | gaattagatc ccacatcgta taaatatcta ttaaccatto taaataaaga gaactccagt |
| 4801 | gttgctatgt gcaagatcct ctcttggagc ttttttgcat agcaattaaa ggtgtgctat |
| 4861 | ttgtcagtag ccattttttt gcagtgattt gaagaccaaa gttgttttac agctgtgtta |
| 4921 | ccgttaaagg tttttttttt tatatgtatt aaatcaattt atcactgttt aaagctttga |
| 4981 | atatctgcaa tctttgccaa ggtacttttt tatttaaaaa aaaacataac tttgtaaata |
| 5041 | ttaccctgta atattatata tacttaataa aacattttaa gctattttgt tgggctattt |
| 5101 | ctattgctgc tacagcagac cacaagcaca tttctgaaaa atttaattta ttaatgtatt |
| 5161 | tttaagttgc ttatattcta ggtaacaatg taaagaatga tttaaaatat taattatgaa |
| 5221 | ttttttgagt ataataccca ataagctttt aattagagca gagttttaat taaaagtttt |
| 5281 | aaatcagtcc aa. The CD47 gene corresponds to ENSG00000196776. |

[0124] By “Cluster of Differentiation 58 (CD58) polypeptide” is meant a protein having at least about 85% amino acid sequence identity to NCBI Reference Sequence Accession No. NP_001770.1, which is provided below, or a fragment thereof that functions in the immune system. CD58 and the Immunobiology thereof is described in Zhang, et al. “CD58 Immunobiology at a Glance,” Frontiers in Immunology, vol. 12, article 705260 (2021), the disclosure of which is incorporated herein by reference in its entirety for all purposes.

| (SEQ ID NO: 461) | |
|---|---|
| 1 | MVAGSDAGRA LGVLSVVCLL HCFGFISCFS QQIYGVVYGN VTFHVPSNVP LKEVLWKKQK |
| 61 | DKVAELENSE FRAFSSFKNR VYLDTVSGSL TIYNLTSSDE DEYEMESPNI TDTMKFFLYV |
| 121 | LESLPSPILT CALINGSIEV QCMIPEHYNS HRGLIMYSWD CPMEQCKRNS TSIYFKMEND |
| 181 | LPQKIQCTLS NPLFNTTSSI ILTTCIPSSG HSRHRYALIP IPLAVITTCI VLYMNGILKC |
| 241 | DRKPDRTNSN |

[0125] By “Cluster of Differentiation 58 (CD58) polynucleotide” is meant a nucleic acid molecule encoding an CD58 polypeptide, as well as the introns, exons, 3′ untranslated regions, 5′ untranslated regions, and regulatory sequences associated with its expression, or fragments thereof. An exemplary CD58 polynucleotide is provided at NCBI Accession No. NM_001779.3, which is reproduced below.

(SEQ ID NO: 462)
ATGGTTGCTGGGAGCGACGCGGGGGGGGCCCTGGGGGTCCTCAGCGTGG
TCTGCCTGCTGCACTGCTTTGGTTTCATCAGCTGTTTTTCCCAACAAAT
ATATGGTGTTGTGTATGGGAATGTAACTTTCCATGTACCAAGCAATGTG
CCTTTAAAAGAGGTCCTATGGAAAAAACAAAAGGATAAAGTTGCAGAAC
TGGAAAATTCTGAATTCAGAGCTTTCTCATCTTTTAAAAATAGGGTTTA
TTTAGACACTGTGTCAGGTAGCCTCACTATCTACAACTTAACATCATCA
GATGAAGATGAGTATGAAATGGAATCGCCAAATATTACTGATACCATGA
AGTTCTTTCTTTATGTGCTTGAGTCTCTTCCATCTCCCACACTAACTTG
TGCATTGACTAATGGAAGCATTGAAGTCCAATGCATGATACCAGAGCAT
TACAACAGCCATCGAGGACTTATAATGTACTCATGGGATTGTCCTATGG
AGCAATGTAAACGTAACTCAACCAGTATATATTTTAAGATGGAAAATGA
TCTTCCACAAAAAATACAGTGTACTCTTAGCAATCCATTATTTAATACA
ACATCATCAATCATTTTGACAACCTGTATCCCAAGCAGCGGTCATTCAA
GACACAGATATGCACTTATACCCATACCATTAGCAGTAATTACAACATG
TATTGTGCTGTATATGAATGGTATTCTGAAATGTGACAGAAAACCAGAC
AGAACCAACTCCAATTGA.
The CD58 gene corresponds to Ensembl:
ENSG00000116815.

[0126] The term “conservative amino acid substitution” or “conservative mutation” refers to the replacement of one amino acid by another amino acid with a common property. A functional way to define common properties between individual amino acids is to analyze the normalized frequencies of amino acid changes between corresponding proteins of homologous organisms (Schulz, G. E. and Schirmer, R. H., Principles of Protein Structure, Springer-Verlag, New York (1979)). According to such analyses, groups of amino acids can be defined where amino acids within a group exchange preferentially with each other, and therefore resemble each other most in their impact on the overall protein structure (Schulz, G. E. and Schirmer, R. H., supra). Non-limiting examples of conservative mutations include amino acid substitutions of amino acids, for example, lysine for arginine and vice versa such that a positive charge can be maintained; glutamic acid for aspartic acid and vice versa such that a negative charge can be maintained; serine for threonine such that a free —OH can be maintained; and glutamine for asparagine such that a free —NH₂ can be maintained.

[0127] The term “coding sequence” or “protein coding sequence” as used interchangeably herein refers to a segment of a polynucleotide that codes for a protein. Coding sequences can also be referred to as open reading frames. The region or sequence is bounded nearer the 5′ end by a start codon and nearer the 3′ end with a stop codon. Stop codons useful with the base editors described herein include the following:

| | |
|---|---|
| Glutamine | CAG → TAG Stop codon |
| | CAA → TAA |
| Arginine | CGA → TGA |
| Tryptophan | TGG → TGA |
| | TGG → TAG |
| | TGG → TAA |

[0128] By “complex” is meant a combination of two or more molecules whose interaction relies on inter-molecular forces. Non-limiting examples of inter-molecular forces include covalent and non-covalent interactions. Non-limiting examples of non-covalent interactions include hydrogen bonding, ionic bonding, halogen bonding, hydrophobic bonding, van der Waals interactions (e.g., dipole-dipole interactions, dipole-induced dipole interactions, and London dispersion forces), and 7r-effects. In an embodiment, a complex comprises polypeptides, polynucleotides, or a combination of one or more polypeptides and one or more polynucleotides. In one embodiment, a complex comprises one or more polypeptides that associate to form a base editor (e.g., base editor comprising a nucleic acid programmable DNA binding protein, such as Cas9, and a deaminase) and a polynucleotide (e.g., a guide RNA). In an embodiment, the complex is held together by hydrogen bonds. It should be appreciated that one or more components of a base editor (e.g., a deaminase, or a nucleic acid programmable DNA binding protein) may associate covalently or non covalently. As one example, a base editor may include a deaminase covalently linked to a nucleic acid programmable DNA binding protein (e.g., by a peptide bond). Alternatively, a base editor may include a deaminase and a nucleic acid programmable DNA binding protein that associate noncovalently (e.g., where one or more components of the base editor are supplied in trans and associate directly or via another molecule such as a protein or nucleic acid). In an embodiment, one or more components of the complex are held together by hydrogen bonds.

[0129] By “cytosine” or “4-Aminopyrimidin-2(1H)-one” is meant a purine nucleobase with the molecular formula C₄H₅N₃O, having the structure

[chemical structure]

and corresponding to CAS No. 71-30-7.

[0130] By “cytidine” is meant a cytosine molecule attached to a ribose sugar via a glycosidic bond, having the structure

[chemical structure]

and corresponding to CAS No. 65-46-3. Its molecular formula is C₉H₁₃N₃O₅.

[0131] By “Cytidine Base Editor (CBE)” is meant a base editor comprising a cytidine deaminase.

[0132] By “Cytidine Base Editor (CBE) polynucleotide” is meant a polynucleotide encoding a CBE.

[0133] By “cytidine deaminase” or “cytosine deaminase” is meant a polypeptide or fragment thereof capable of catalyzing a deaminating cytidine or cytosine. In embodiments, the cytidine or cytosine is present in a polynucleotide. In one embodiment, the cytidine deaminase converts cytosine to uracil or 5-methylcytosine to thymine. The terms “cytidine deaminase” and “cytosine deaminase” are used interchangeably throughout the application. PmCDA1 (SEQ ID NO: 13-14), which is derived from Petromyzon marinus (Petromyzon marinus cytosine deaminase 1, “PmCDA1”), AID (Activation-induced cytidine deaminase; AICDA) (Exemplary AID polypeptide sequences are provided in the Sequence Listing as SEQ ID NOs: 15-21), which is derived from a mammal (e.g., human, swine, bovine, horse, monkey etc.), and APOBEC are exemplary cytidine deaminases (Exemplary APOBEC polypeptide sequences are provided in the Sequence Listing as SEQ ID NOs: 12-61. Further exemplary cytidine deaminase (CDA) sequences are provided in the Sequence Listing as SEQ ID NOs: 62-66. Additional exemplary cytidine deaminase sequences, including APOBEC polypeptide sequences, are provided in the Sequence Listing as SEQ ID NOs: 67-189. Non-limiting examples of cytidine deaminases include those described in PCT/US20/16288, PCT/US2018/021878, 180802-021804/PCT, PCT/US2018/048969, and PCT/US2016/058344.

[0134] By “cytosine” is meant a pyrimidine nucleobase with the molecular formula C₄H₅N₃O.

[0135] By “cytosine deaminase activity” is meant catalyzing the deamination of cytosine or cytidine. In one embodiment, a polypeptide having cytosine deaminase activity converts an amino group to a carbonyl group. In an embodiment, a cytosine deaminase converts cytosine to uracil (i.e., C to U) or 5-methylcytosine to thymine (i.e., 5mC to T). In some embodiments, a cytosine deaminase as provided herein has increased cytosine deaminase activity (e.g., at least 10-fold, 20-fold, 30-fold, 40-fold, 50-fold, 60-fold, 70-fold, 80-fold, 90-fold, 100-fold or more) relative to a reference cytosine deaminase.

[0136] The term “deaminase” or “deaminase domain,” as used herein, refers to a protein or fragment thereof that catalyzes a deamination reaction.

[0137] “Detect” refers to identifying the presence, absence or amount of the analyte to be detected. In one embodiment, a sequence alteration in a polynucleotide or polypeptide is detected. In another embodiment, the presence of indels is detected.

[0138] By “detectable label” is meant a composition that when linked to a molecule of interest renders the latter detectable, via spectroscopic, photochemical, biochemical, immunochemical, or chemical means. For example, useful labels include radioactive isotopes, magnetic beads, metallic beads, colloidal particles, fluorescent dyes, electron-dense reagents, enzymes (for example, as commonly used in an enzyme linked immunosorbent assay (ELISA)), biotin, digoxigenin, or haptens.

[0139] By “disease” is meant any condition or disorder that damages or interferes with the normal function of a cell, tissue, or organ. In some embodiments, the disease is hematological cancer or solid tumors.

[0140] By “dual editing activity” or “dual deaminase activity” is meant having adenosine deaminase and cytidine deaminase activity. In one embodiment, a base editor having dual editing activity has both A→G and C→T activity, wherein the two activities are approximately equal or are within about 10% or 20% of each other. In another embodiment, a dual editor has A→G activity that no more than about 10% or 20% greater than C→T activity. In another embodiment, a dual editor has A→G activity that is no more than about 10% or 20% less than C→T activity. In some embodiments, the adenosine deaminase variant has predominantly cytosine deaminase activity, and little, if any, adenosine deaminase activity. In some embodiments, the adenosine deaminase variant has cytosine deaminase activity, and no significant or no detectable adenosine deaminase activity.

[0141] By “effective amount” is meant the amount of an agent or active compound, a modified immune cell, or a base editor as described herein, that is required to ameliorate the symptoms of a disease relative to an untreated patient or an individual without disease, i.e., a healthy individual, or is the amount of the agent or active compound sufficient to elicit a desired biological response. The effective amount of active compound(s) used to practice the present invention for therapeutic treatment of a disease varies depending upon the manner of administration, the age, body weight, and general health of the subject. Ultimately, the attending physician or veterinarian will decide the appropriate amount and dosage regimen. Such amount is referred to as an “effective” amount. In one embodiment, an effective amount is the amount of a base editor of the present disclosure sufficient to introduce an alteration in a gene of interest in a cell (e.g., a cell in vitro or in vivo). In one embodiment, an effective amount is the amount of a base editor required to achieve a therapeutic effect. Such therapeutic effect need not be sufficient to alter a pathogenic gene in all cells of a subject, tissue or organ, but only to alter the pathogenic gene in about 1%, 5%, 10%, 25%, 50%, 75% or more of the cells present in a subject, tissue or organ. In one embodiment, an effective amount is the amount of a modified immune cell (e.g., T- or NK-cell) required to achieve a therapeutic effect (e.g., reduce or stabilize cancer cell proliferation, tumor burden, or cancer cell survival). In one embodiment, an effective amount is sufficient to ameliorate one or more symptoms of a disease.

[0142] The term “exonuclease” refers to a protein or polypeptide capable of removing successive nucleotides from either the 5′ or 3′ end of a polynucleotide (e.g., RNA or DNA).

[0143] The term “endonuclease” refers to a protein or polypeptide capable of catalyzing the cleavage of internal regions in a nucleic acid molecule (e.g., DNA or RNA).

[0144] By “fragment” is meant a portion of a polypeptide or nucleic acid molecule. This portion contains, at least about 10%, 20%, 30%, 40%, 50%, 60%, 70%, 80%, or 90% of the entire length of the reference nucleic acid molecule or polypeptide. A fragment may contain 10, 20, 30, 40, 50, 60, 70, 80, 90, or 100, 200, 300, 400, 500, 600, 700, 800, 900, or 1000 nucleotides or amino acids.

[0145] In general, a “gene” is a region on the genome that is capable of being transcribed to an RNA that either has a regulatory function, a catalytic function, and/or encodes a protein. An eukaryotic gene typically has introns and exons, which may organize to produce different RNA splice variants that encode alternative versions of a mature protein. The skilled artisan will appreciate that the present disclosure encompasses all transcripts encoding a polypeptide of interest, including splice variants, allelic variants and transcripts that occur because of alternative promoter sites or alternative poly-adenylation sites. A “full-length” gene or RNA therefore encompasses any naturally occurring splice variants, allelic variants, other alternative transcripts, splice variants generated by recombinant technologies which bear the same function as the naturally occurring variants, and the resulting RNA molecules. In some embodiments, the fragment is a functional fragment.

[0146] “Graft versus host disease” (GVHD) refers to a pathological condition where transplanted cells of a donor generate an immune response against cells of the host.

[0147] By “guide polynucleotide” is meant a polynucleotide or polynucleotide complex which is specific for a target sequence and can form a complex with a polynucleotide programmable nucleotide binding domain protein (e.g., Cas9 or Cpf1). In an embodiment, the guide polynucleotide is a guide RNA (gRNA). gRNAs can exist as a complex of two or more RNAs, or as a single RNA molecule. In some embodiments the guide polynucleotide is selected from Table 1 or Table 1B.

[0148] “Host versus graft disease” (HVGD) or “host-versus-graft rejection” refers to a pathological condition where the immune system of a host generates an immune response against transplanted cells of an allogeneic donor.

[0149] By “Human Leukocyte Antigen-E (HLA-E) polypeptide” is meant a protein having at least about 85% amino acid sequence identity to NCBI Accession No. NP_005507.3, or a fragment thereof having immunomodulatory activity. An exemplary amino acid sequence is provided below.

| (SEQ ID NO: 463) | |
|---|---|
| 1 | mvdgtlllll sealaltqtw agshslkyfh tsvsrpgrge prfisvgyvd dtqfvrfdnd |
| 61 | aasprmvpra pwmegegsey wdretrsard taqifrvnlr tlrgyynqse agshtlqwmh |
| 121 | gcelgpdgrf lrgyeqfayd gkdyltlned lrswtavdta aqiseqksnd aseaehqray |
| 181 | ledtcvewlh kylekgketl lhleppkthv thhpisdhea tlrcwalgfy paeitltwqq |
| 241 | dgeghtqdte lvetrpagdg tfqkwaavvv psgeeqrytc hvqheglpep vtlrwkpasq |
| 301 | ptipivgiia glvllgsvvs gavvaaviwr kkssggkggs yskaewsdsa qgseshsl. |

[0150] By “Human Leukocyte Antigen-E (HLA-E) polynucleotide” is meant a nucleic acid molecule encoding an HLA-E polypeptide, as well as the introns, exons, 3′ untranslated regions, 5′ untranslated regions, and regulatory sequences associated with its expression, or fragments thereof. An exemplary HLA-E polynucleotide is provided at NCBI Accession No. NM_005516.6, which is provided below.

| (SEQ ID NO: 464) | |
|---|---|
| 1 | ctcaggactc agaggctggg atcatggtag atggaaccct ccttttactc ctctcggagg |
| 61 | ccctggccct tacccagacc tgggcgggct cccactcctt gaagtatttc cacacttccg |
| 121 | tgtcccggcc cggccgcggg gagccccgct tcatctctgt gggctacgtg gacgacaccc |
| 181 | agttcgtgcg cttcgacaac gacgccgcga gtccgaggat ggtgccgcgg gcgccgtgga |
| 241 | tggagcagga ggggtcagag tattgggacc gggagacacg gagcgccagg gacaccgcac |
| 301 | agattttccg agtgaatctg cggacgctgc gcggctacta caatcagagc gaggccgggt |
| 361 | ctcacaccct gcagtggatg catggctgcg agctggggcc cgacgggcgc ttcctccgcg |
| 421 | ggtatgaaca gttcgcctac gacggcaagg attatctcac cctgaatgag gacctgcgct |
| 481 | cctggaccgc ggtggacacg gcggctcaga tctccgagca aaagtcaaat gatgcctctg |
| 541 | aggcggagca ccagagagcc tacctggaag acacatgcgt ggagtggctc cacaaatacc |
| 601 | tggagaaggg gaaggagacg ctgcttcacc tggagccccc aaagacacac gtgactcacc |
| 661 | accccatctc tgaccatgag gccaccctga ggtgctgggc cctgggcttc taccctgcgg |
| 721 | agatcacact gacctggcag caggatgggg agggccatac ccaggacacg gagctcgtgg |
| 781 | agaccaggcc tgcaggggat ggaaccttcc agaagtgggc agctgtggtg gtgccttctg |
| 841 | gagaggagca gagatacacg tgccatgtgc agcatgaggg gctacccgag cccgtcaccc |
| 901 | tgagatggaa gccggcttcc cagcccacca tccccatcgt gggcatcatt gctggcctgg |
| 961 | ttctccttgg atctgtggtc tctggagctg tggttgctgc tgtgatatgg aggaagaaga |
| 1021 | gctcaggtgg aaaaggaggg agctactcta aggctgagtg gagcgacagt gcccaggggt |
| 1081 | ctgagtctca cagcttgtaa agcctgagac agctgccttg tgtgcgactg agatgcacag |
| 1141 | ctgccttgtg tgcgactgag atgcaggatt tcctcacgcc tcccctatgt gtcttagggg |
| 1201 | actctggctt ctctttttgc aagggcctct gaatctgtct gtgtccctgt tagcacaatg |
| 1261 | tgaggaggta gagaaacagt ccacctctgt gtctaccatg acccccttcc tcacactgac |
| 1321 | ctgtgttcct tccctgttct cttttctatt aaaaataaga acctgggcag agtgcggcag |
| 1381 | ctcatgcctg taatcccagc acttagggag gccgaggagg gcagatcacg aggtcaggag |
| 1441 | atcgaaacca tcctggctaa cacggtgaaa ccccgtctct actaaaaaat acaaaaaatt |
| 1501 | agctgggcgc agaggcacgg gcctgtagtc ccagctactc aggaggcgga ggcaggagaa |
| 1561 | tggcgtcaac ccgggaggcg gaggttgcag tgagccagga ttgtgcgact gcactccagc |
| 1621 | ctgggtgaca gggtgaaacg ccatctcaaa aaataaaaat tgaaaaataa aaaaagaacc |
| 1681 | tggatctcaa tttaattttt catattcttg caatgaaatg gacttgagga agctaagatc |
| 1741 | atagctagaa atacagataa ttccacagca catctctagc aaatttagcc tattcctatt |
| 1801 | ctctagccta ttccttacca cctgtaatct tgaccatata ccttggagtt gaatattgtt |
| 1861 | ttcatactgc tgtggtttga atgttccctc caacactcat gttgagactt aatccctaat |
| 1921 | gtggcaatac tgaaaggtgg ggcctttgag atgtgattgg atcgtaaggc tgtgccttca |
| 1981 | ttcatgggtt aatggattaa tgggttatca caggaatggg actggtggct ttataagaag |
| 2041 | aggaaaagag aactgagcta gcatgcccag cccacagaga gcctccacta gagtgatgct |
| 2101 | aagtggaaat gtgaggtgca gctgccacag agggccccca ccagggaaat gtctagtgtc |
| 2161 | tagtggatcc aggccacagg agagagtgcc ttgtggagcg ctgggagcag gacctgacca |
| 2221 | ccaccaggac cccagaactg tggagtcagt ggcagcatgc agcgccccct tgggaaagct |
| 2281 | ttaggcacca gcctgcaacc cattcgagca gccacgtagg ctgcacccag caaagccaca |
| 2341 | ggcacggggc tacctgaggc cttgggggcc caatccctgc tccagtgtgt ccgtgaggca |
| 2401 | gcacacgaag tcaaaagaga ttattctctt cccacagata ccttttctct cccatgaccc |
| 2461 | tttaacagca tctgcttcat tcccctcacc ttcccaggct gatctgaggt aaactttgaa |
| 2521 | gtaaaataaa agctgtgttt gagcatca. |

The HLA-E gene corresponds to Ensembl: ENSG00000116815.

[0151] By “Human Leukocyte Antigen-G (HLA-G) polypeptide” is meant a protein having at least about 85% amino acid sequence identity to NCBI Accession No. NP_001350496.1, which is provided below, or a fragment thereof having immunomodulatory activity.

| (SEQ ID NO: 465) | |
|---|---|
| 1 | mktprmvvma prtlflllsg altltetwag shsmryfsaa vsrpgrgepr fiamgyvddt |
| 61 | qfvrfdsdsa cprmeprapw veqegpeywe eetrntkaha qtdrmnlqtl rgyynqseas |
| 121 | shtlqwmigc dlgsdgrllr gyeqyaydgk dylalnedlr swtaadtaaq iskrkceaan |
| 181 | vaeqrrayle gtcvewlhry lengkemlqr adppkthvth hpvfdyeatl rcwalgfypa |
| 241 | eiiltwqrdg edqtqdvelv etrpagdgtf qkwaavvvps geeqrytchv qheglpeplm |
| 301 | lrwkqsslpt ipimgivagl vvlaavvtga avaavlwrkk ssd |

[0152] By “Human Leukocyte Antigen-G (HLA-G) polynucleotide” is meant a nucleic acid molecule encoding an HLA-G polypeptide, as well as the introns, exons, 3′ untranslated regions, 5′ untranslated regions, and regulatory sequences associated with its expression, or fragments thereof. An exemplary HLA-G polynucleotide is provided at NCBI Accession No. NM_001363567.2, which is provided below.

| (SEQ ID NO: 466) | |
|---|---|
| 1 | atatagtaac atagtgtggt actttgtctt gaggagatgt cctggactca cacggaaact |
| 61 | tagggctacg gaatgaagac gccaaggatg gtggtcatgg cgccccgaac cctcttcctg |
| 121 | ctgctctcgg gggccctgac cctgaccgag acctgggcgg gctcccactc catgaggtat |
| 181 | ttcagcgccg ccgtgtcccg gcccggccgc ggggagcccc gcttcatcgc catgggctac |
| 241 | gtggacgaca cgcagttcgt gcggttcgac agcgactcgg cgtgtccgag gatggagccg |
| 301 | cgggcgccgt gggtggagca ggaggggccg gagtattggg aagaggagac acggaacacc |
| 361 | aaggcccacg cacagactga cagaatgaac ctgcagaccc tgcgcggcta ctacaaccag |
| 421 | agcgaggcca gttctcacac cctccagtgg atgattggct gcgacctggg gtccgacgga |
| 481 | cgcctcctcc gcgggtatga acagtatgcc tacgatggca aggattacct cgccctgaac |
| 541 | gaggacctgc gctcctggac cgcagcggac actgcggctc agatctccaa gcgcaagtgt |
| 601 | gaggcggcca atgtggctga acaaaggaga gcctacctgg agggcacgtg cgtggagtgg |
| 661 | ctccacagat acctggagaa cgggaaggag atgctgcagc gcgcggaccc ccccaagaca |
| 721 | cacgtgaccc accaccctgt ctttgactat gaggccaccc tgaggtgctg ggccctgggc |
| 781 | ttctaccctg cggagatcat actgacctgg cagcgggatg gggaggacca gacccaggac |
| 841 | gtggagctcg tggagaccag gcctgcaggg gatggaacct tccagaagtg ggcagctgtg |
| 901 | gtggtgcctt ctggagagga gcagagatac acgtgccatg tgcagcatga ggggctgccg |
| 961 | gagcccctca tgctgagatg gaagcagtct tccctgccca ccatccccat catgggtatc |
| 1021 | gttgctggcc tggttgtcct tgcagctgta gtcactggag ctgcggtcgc tgctgtgctg |
| 1081 | tggagaaaga agagctcaga ttgaaaagga gggagctact ctcaggctgc aatgtgaaac |
| 1141 | agctgccctg tgtgggactg agtggcaagt ccctttgtga cttcaagaac cctgactcct |
| 1201 | ctttgtgcag agaccagccc acccctgtgc ccaccatgac cctcttcctc atgctgaact |
| 1261 | gcattccttc cccaatcacc tttcctgttc cagaaaaggg gctgggatgt ctccgtctct |
| 1321 | gtctcaaatt tgtggtccac tgagctataa cttacttctg tattaaaatt agaatctgag |
| 1381 | tataa. |

The HLA-G gene corresponds to ENSG00000230413, ENSG00000233095,
ENSG00000237216, ENSG00000276051 and ENGS00000204632.

[0153] “Hybridization” means hydrogen bonding, which may be Watson-Crick, Hoogsteen or reversed Hoogsteen hydrogen bonding, between complementary nucleobases. For example, adenine and thymine are complementary nucleobases that pair through the formation of hydrogen bonds.

[0154] By “immune cell” is meant a cell of the immune system capable of generating an immune response. Exemplary immune cell include, but are not limited to, T cells, NK cells, B cells, macrophages, hematopoietic stem cells, or precursors thereof. In embodiments, an immune cell is allogeneic to a subject to whom the cell is to be administered. In embodiments, an immune cell is from a donor and is allogeneic to a subject to which the immune cell will be administered after being modified according to the methods provided herein. The invention of the disclosure features methods for preparing modified allogeneic immune cells with improved characteristics (e.g., increased persistence in a subject) as well as the cells produced by these methods.

[0155] By “immune effector cell” is meant a lymphocyte, once activated, capable of effecting an immune response upon a target cell. In some embodiments, immune effector cells are effector T cells. In some embodiments, the effector T cell is a naïve CD8⁺ T cell, a cytotoxic T cell, a natural killer T (NKT) cell, a natural killer (NK) cell, or a regulatory T (Treg) cell. In some embodiments, immune effector cells are effector NK cells. In some embodiments, the effector T cells are thymocytes, immature T lymphocytes, mature T lymphocytes, resting T lymphocytes, or activated T lymphocytes. In some embodiments the immune effector cell is a CD4⁺ CD8⁺ T cell or a CD4⁻ CD8⁻ T cell. In some embodiments the immune effector cell is a T helper cell. In some embodiments the T helper cell is a T helper 1 (Th1), a T helper 2 (Th2) cell, or a helper T cell expressing CD4 (CD4+ T cell).

[0156] By “immune response regulation polypeptide” is meant a protein that modulates an immune response. An immune response regulation polypeptide may directly or indirectly modulate an immune response. For example, an immune response regulation polypeptide may increase or decrease the activation of an immune cell, e.g. a T cell, NK cell. An immune response regulation polypeptide may increase or decrease the activation threshold of an immune cell. In some embodiments, the immune response regulation polypeptide modulates a signal

[0157] By “immune response regulation polynucleotide” or “immune response regulator polynucleotide” is meant a nucleic acid molecule that encodes a polypeptide that modulates an immune response.

[0158] By “immunogen” is meant a polypeptide or fragment thereof capable of inducing an immune response. Exemplary immunogens include CD2, CD3e, CD3 delta, CD3 gamma, TRAC, TRBC1, TRBC2, CD4, CD5, CD7, CD8, CD19, CD23, CD27, CD28, CD30, CD33, CD52, CD58, CD70, CD127, CD122, CD130, CD132, CD38, CD69, CD11a, CD58, CD99, CD103, CCR4, CCR5, CCR6, CCR9, CCR10, CXCR3, CXCR4, CLA, CD161, 02M, and CIITA polypeptide and antigenic fragments thereof.

[0159] By “immunogen encoding polynucleotide” is meant a nucleic acid molecule that encodes an immunogen.

[0160] By “immunomodulatory activity” is meant increasing, decreasing, or sustaining an immune response.

[0161] By “increases” is meant a positive alteration of at least 10%, 25%, 50%, 75%, or 100%, or about 1.5 fold, about 2 fold, about 3-fold, about 4-fold, about 5-fold, about 6-fold, about 7-fold, about 8-fold, about 9-fold, about 10-fold, about 15-fold, about 20-fold, about 25-fold, about 30-fold, about 35-fold, about 40-fold, about 45-fold, about 50-fold, or about 100-fold.

[0162] The terms “inhibitor of base repair”, “base repair inhibitor”, “IBR” or their grammatical equivalents refer to a protein that is capable in inhibiting the activity of a nucleic acid repair enzyme, for example a base excision repair enzyme.

[0163] An “intein” is a fragment of a protein that is able to excise itself and join the remaining fragments (the exteins) with a peptide bond in a process known as protein splicing.

[0164] The terms “isolated,” “purified,” or “biologically pure” refer to material that is free to varying degrees from components which normally accompany it as found in its native state. “Isolate” denotes a degree of separation from original source or surroundings. “Purify” denotes a degree of separation that is higher than isolation. A “purified” or “biologically pure” protein is sufficiently free of other materials such that any impurities do not materially affect the biological properties of the protein or cause other adverse consequences. That is, a nucleic acid or peptide of the present disclosure is purified if it is substantially free of cellular material, viral material, or culture medium when produced by recombinant DNA techniques, or chemical precursors or other chemicals when chemically synthesized. Purity and homogeneity are typically determined using analytical chemistry techniques, for example, polyacrylamide gel electrophoresis or high performance liquid chromatography. The term “purified” can denote that a nucleic acid or protein gives rise to essentially one band in an electrophoretic gel. For a protein that can be subjected to modifications, for example, phosphorylation or glycosylation, different modifications may give rise to different isolated proteins, which can be separately purified.

[0165] By “isolated polynucleotide” is meant a nucleic acid molecule that is free of the genes which, in the naturally-occurring genome of the organism from which the nucleic acid molecule of the present disclosure is derived, flank the gene. The term therefore includes, for example, a recombinant DNA that is incorporated into a vector; into an autonomously replicating plasmid or virus; or into the genomic DNA of a prokaryote or eukaryote; or that exists as a separate molecule (for example, a cDNA or a genomic or cDNA fragment produced by PCR or restriction endonuclease digestion) independent of other sequences. In addition, the term includes an RNA molecule that is transcribed from a DNA molecule, as well as a recombinant DNA that is part of a hybrid gene encoding additional polypeptide sequence.

[0166] By an “isolated polypeptide” is meant a polypeptide of the present disclosure that has been separated from components that naturally accompany it. Typically, the polypeptide is isolated when it is at least 60%, by weight, free from the proteins and naturally-occurring organic molecules with which it is naturally associated. Preferably, the preparation is at least 75%, more preferably at least 90%, and most preferably at least 99%, by weight, a polypeptide of the present disclosure. An isolated polypeptide of the present disclosure may be obtained, for example, by extraction from a natural source, by expression of a recombinant nucleic acid encoding such a polypeptide; or by chemically synthesizing the protein. Purity can be measured by any appropriate method, for example, column chromatography, polyacrylamide gel electrophoresis, or by HPLC analysis.

[0167] The term “linker”, as used herein, refers to a molecule that links two moieties. In some embodiments, a linker comprises amino acids, nucleic acids, or analogs thereof. In one embodiment, the term “linker” refers to a covalent linker (e.g., covalent bond) or a non-covalent linker.

[0168] By “marker” is meant any protein or polynucleotide having an alteration in expression, level, structure, or activity that is associated with a disease or disorder.

[0169] The term “mutation,” as used herein, refers to a substitution of a residue within a sequence, e.g., a nucleic acid or amino acid sequence, with another residue, or a deletion or insertion of one or more residues within a sequence. Mutations are typically described herein by identifying the original residue followed by the position of the residue within the sequence and by the identity of the newly substituted residue. Various methods for making the amino acid substitutions (mutations) provided herein are well known in the art, and are provided by, for example, Green and Sambrook, Molecular Cloning: A Laboratory Manual (4^{th} ed., Cold Spring Harbor Laboratory Press, Cold Spring Harbor, N.Y. (2012)). In some embodiments, the mutation is a missense mutation. In some embodiments, the missense mutation tunes the stability or bioactivity of β2M or components of the peptide loading complex (PLC). In some embodiments, mutations as provided herein are within a peptide binding site, ATP binding site, splice site, promoter, enhancer, or in an untranslated region (UTR).

[0170] The terms “nucleic acid” and “nucleic acid molecule,” as used herein, refer to a compound comprising a nucleobase and an acidic moiety, e.g., a nucleoside, a nucleotide, or a polymer of nucleotides. Typically, polymeric nucleic acids, e.g., nucleic acid molecules comprising three or more nucleotides are linear molecules, in which adjacent nucleotides are linked to each other via a phosphodiester linkage. In some embodiments, “nucleic acid” refers to individual nucleic acid residues (e.g. nucleotides and/or nucleosides). In some embodiments, “nucleic acid” refers to an oligonucleotide chain comprising three or more individual nucleotide residues. As used herein, the terms “oligonucleotide” and “polynucleotide” can be used interchangeably to refer to a polymer of nucleotides (e.g., a string of at least three nucleotides). In some embodiments, “nucleic acid” encompasses RNA as well as single and/or double-stranded DNA. Nucleic acids may be naturally occurring, for example, in the context of a genome, a transcript, an mRNA, tRNA, rRNA, siRNA, snRNA, a plasmid, cosmid, chromosome, chromatid, or other naturally occurring nucleic acid molecule. On the other hand, a nucleic acid molecule may be a non-naturally occurring molecule, e.g., a recombinant DNA or RNA, an artificial chromosome, an engineered genome, or fragment thereof, or a synthetic DNA, RNA, DNA/RNA hybrid, or including non-naturally occurring nucleotides or nucleosides. Furthermore, the terms “nucleic acid,” “DNA,” “RNA,” and/or similar terms include nucleic acid analogs, e.g., analogs having other than a phosphodiester backbone. Nucleic acids can be purified from natural sources, produced using recombinant expression systems and optionally purified, chemically synthesized, etc. Where appropriate, e.g., in the case of chemically synthesized molecules, nucleic acids can comprise nucleoside analogs such as analogs having chemically modified bases or sugars, and backbone modifications. A nucleic acid sequence is presented in the 5′ to 3′ direction unless otherwise indicated. In some embodiments, a nucleic acid is or comprises natural nucleosides (e.g. adenosine, thymidine, guanosine, cytidine, uridine, deoxyadenosine, deoxythymidine, deoxyguanosine, and deoxycytidine); nucleoside analogs (e.g., 2-aminoadenosine, 2-thiothymidine, inosine, pyrrolo-pyrimidine, 3-methyl adenosine, 5-methylcytidine, 2-aminoadenosine, C5-bromouridine, C5-fluorouridine, C5-iodouridine, C5-propynyl-uridine, C5-propynyl-cytidine, C5-methylcytidine, 2-aminoadenosine, 7-deazaadenosine, 7-deazaguanosine, 8-oxoadenosine, 8-oxoguanosine, 0(6)-methylguanine, and 2-thiocytidine); chemically modified bases; biologically modified bases (e.g., methylated bases); intercalated bases; modified sugars (2′-e.g., fluororibose, ribose, 2′-deoxyribose, arabinose, and hexose); and/or modified phosphate groups (e.g., phosphorothioates and 5′-N-phosphoramidite linkages).

[0171] The term “nuclear localization sequence,” “nuclear localization signal,” or “NLS” refers to an amino acid sequence that promotes import of a protein into the cell nucleus. Nuclear localization sequences are known in the art and described, for example, in Plank et al., International PCT application, PCT/EP2000/011690, filed Nov. 23, 2000, published as WO/2001/038547 on May 31, 2001, the contents of which are incorporated herein by reference for their disclosure of exemplary nuclear localization sequences. In other embodiments, the NLS is an optimized NLS described, for example, by Koblan et al., Nature Biotech. 2018 doi:10.1038/nbt.4172. In some embodiments, an NLS comprises the amino acid sequence

(SEQ ID NO: 190)
KRTADGSEFESPKKKRKV,
(SEQ ID NO: 191)
KRPAATKKAGQAKKKK,
(SEQ ID NO: 192)
KKTELQTTNAENKTKKL,
(SEQ ID NO: 193)
KRGINDRNFWRGENGRKTR,
(SEQ ID NO: 194)
RKSGKIAAIVVKRPRK,
(SEQ ID NO: 195)
PKKKRKV,
or
(SEQ ID NO: 196)
MDSLLMNRRKFLYQFKNVRWAKGRRETYLC.

[0172] The term “nucleobase,” “nitrogenous base,” or “base,” used interchangeably herein, refers to a nitrogen-containing biological compound that forms a nucleoside, which in turn is a component of a nucleotide. The ability of nucleobases to form base pairs and to stack one upon another leads directly to long-chain helical structures such as ribonucleic acid (RNA) and deoxyribonucleic acid (DNA). Five nucleobases—adenine (A), cytosine (C), guanine (G), thymine (T), and uracil (U)—are called primary or canonical. Adenine and guanine are derived from purine, and cytosine, uracil, and thymine are derived from pyrimidine. DNA and RNA can also contain other (non-primary) bases that are modified. Non-limiting exemplary modified nucleobases can include hypoxanthine, xanthine, 7-methylguanine, 5,6-dihydrouracil, 5-methylcytosine (m5C), and 5-hydromethylcytosine. Hypoxanthine and xanthine can be created through mutagen presence, both of them through deamination (replacement of the amine group with a carbonyl group). Hypoxanthine can be modified from adenine. Xanthine can be modified from guanine. Uracil can result from deamination of cytosine. A “nucleoside” consists of a nucleobase and a five carbon sugar (either ribose or deoxyribose). Examples of a nucleoside include adenosine, guanosine, uridine, cytidine, 5-methyluridine (m5U), deoxyadenosine, deoxyguanosine, thymidine, deoxyuridine, and deoxycytidine. Examples of a nucleoside with a modified nucleobase includes inosine (I), xanthosine (X), 7-methylguanosine (m7G), dihydrouridine (D), 5-methylcytidine (m5C), and pseudouridine (Ψ). A “nucleotide” consists of a nucleobase, a five carbon sugar (either ribose or deoxyribose), and at least one phosphate group. Non-limiting examples of modified nucleobases and/or chemical modifications that a modified nucleobase may include are the following: pseudo-uridine, 5-Methyl-cytosine, 2′-O-methyl-3′-phosphonoacetate, 2′-O-methyl thioPACE (MSP), 2′-O-methyl-PACE (MP), 2′-fluoro RNA (2′-F-RNA), constrained ethyl (S-cEt), 2′-O-methyl (‘M’), 2′-O-methyl-3′-phosphorothioate (‘MS’), 2′-O-methyl-3′-thiophosphonoacetate (‘MSP’), 5-methoxyuridine, phosphorothioate, and N1-Methylpseudouridine.

[0173] The term “nucleic acid programmable DNA binding protein” or “napDNAbp” may be used interchangeably with “polynucleotide programmable nucleotide binding domain” to refer to a protein that associates with a nucleic acid (e.g., DNA or RNA), such as a guide nucleic acid or guide polynucleotide (e.g., gRNA), that guides the napDNAbp to a specific nucleic acid sequence. In some embodiments, the polynucleotide programmable nucleotide binding domain is a polynucleotide programmable DNA binding domain. In some embodiments, the polynucleotide programmable nucleotide binding domain is a polynucleotide programmable RNA binding domain. In some embodiments, the polynucleotide programmable nucleotide binding domain is a Cas9 protein. A Cas9 protein can associate with a guide RNA that guides the Cas9 protein to a specific DNA sequence that is complementary to the guide RNA. In some embodiments, the napDNAbp is a Cas9 domain, for example a nuclease active Cas9, a Cas9 nickase (nCas9), or a nuclease inactive Cas9 (dCas9). Non-limiting examples of nucleic acid programmable DNA binding proteins include, Cas9 (e.g., dCas9 and nCas9), Cas12a/Cpf1, Cas12b/C2cl, Cas12c/C2c3, Cas12d/CasY, Cas12e/CasX, Cas12g, Cas12h, Cas12i, and Cas12j/Cas4′ (Cas12j/Casphi). Non-limiting examples of Cas enzymes include CasT, Cas1B, Cas2, Cas3, Cas4, Cas5, Cas5d, Cas5t, Cas5h, Cas5a, Cas6, Cas7, Cas8, Cas8a, Cas8b, Cas8c, Cas9 (also known as Csn1 or Csx12), Cas10, Cas10d, Cas12a/Cpf1, Cas12b/C2cl, Cas12c/C2c3, Cas12d/CasY, Cas12e/CasX, Cas12g, Cas12h, Cas12i, Cas12j/CasΦ, Cpf1, Csy1, Csy2, Csy3, Csy4, Cse1, Cse2, Cse3, Cse4, Cse5e, Csc1, Csc2, Csa5, Csn1, Csn2, Csm1, Csm2, Csm3, Csm4, Csm5, Csm6, Cmr1, Cmr3, Cmr4, Cmr5, Cmr6, Csb1, Csb2, Csb3, Csx17, Csx14, Csx10, Csx16, CsaX, Csx3, Csx1, Csx1S, Csx11, Csf1, Csf2, CsO, Csf4, Csd1, Csd2, Cst1, Cst2, Csh1, Csh2, Csa1, Csa2, Csa3, Csa4, Csa5, Type II Cas effector proteins, Type V Cas effector proteins, Type VI Cas effector proteins, CARF, DinG, homologues thereof, or modified or engineered versions thereof. Other nucleic acid programmable DNA binding proteins are also within the scope of this disclosure, although they may not be specifically listed in this disclosure. See, e.g., Makarova et al. “Classification and Nomenclature of CRISPR-Cas Systems: Where from Here?” CRISPR J. 2018 October; 1:325-336. doi: 10.1089/crispr.2018.0033; Yan et al., “Functionally diverse type V CRISPR-Cas systems” Science. 2019 Jan. 4; 363(6422):88-91. doi: 10.1126/science.aav7271, the entire contents of each are hereby incorporated by reference. Exemplary nucleic acid programmable DNA binding proteins and nucleic acid sequences encoding nucleic acid programmable DNA binding proteins are provided in the Sequence Listing as SEQ ID NOs: 197-230 and 378.

[0174] The terms “nucleobase editing domain” or “nucleobase editing protein,” as used herein, refers to a protein or enzyme that can catalyze a nucleobase modification in RNA or DNA, such as cytosine (or cytidine) to uracil (or uridine) or thymine (or thymidine), and adenine (or adenosine) to hypoxanthine (or inosine) deaminations, as well as non-templated nucleotide additions and insertions. In some embodiments, the nucleobase editing domain is a deaminase domain (e.g., an adenine deaminase or an adenosine deaminase; or a cytidine deaminase or a cytosine deaminase).

[0175] As used herein, “obtaining” as in “obtaining an agent” includes synthesizing, purchasing, or otherwise acquiring the agent.

[0176] By “subject” or “patient” is meant a mammal, including, but not limited to, a human or non-human mammal. In embodiments, the mammal is a bovine, equine, canine, ovine, rabbit, rodent, nonhuman primate, or feline. In an embodiment, “patient” refers to a mammalian subject with a higher than average likelihood of developing a disease or a disorder. Exemplary patients can be humans, non-human primates, cats, dogs, pigs, cattle, cats, horses, camels, llamas, goats, sheep, rodents (e.g., mice, rabbits, rats, or guinea pigs) and other mammalians that can benefit from the therapies disclosed herein. Exemplary human patients can be male and/or female. In embodiments the subject is allogeneic to cells administered to the subject. “Patient in need thereof” or “subject in need thereof” is referred to herein as a patient diagnosed with, at risk or having, predetermined to have, or suspected of having a disease or disorder.

[0177] The terms “pathogenic mutation”, “pathogenic variant”, “disease causing mutation”, “disease causing variant”, “deleterious mutation”, or “predisposing mutation” refers to a genetic alteration or mutation that is associated with a disease or disorder or that increases an individual's susceptibility or predisposition to a certain disease or disorder. In some embodiments, the pathogenic mutation comprises at least one wild-type amino acid substituted by at least one pathogenic amino acid in a protein encoded by a gene.

[0178] The term “pharmaceutically-acceptable carrier” means a pharmaceutically-acceptable material, composition or vehicle, such as a liquid or solid filler, diluent, excipient, manufacturing aid (e.g., lubricant, talc magnesium, calcium or zinc stearate, or steric acid), or solvent encapsulating material, involved in carrying or transporting the compound from one site (e.g., the delivery site) of the body, to another site (e.g., organ, tissue or portion of the body). A pharmaceutically acceptable carrier is “acceptable” in the sense of being compatible with the other ingredients of the formulation and not injurious to the tissue of the subject (e.g. physiologically compatible, sterile, physiologic pH, etc.). The terms such as “excipient,” “carrier,” “pharmaceutically acceptable carrier,” “vehicle,” or the like are used interchangeably herein.

[0179] The term “pharmaceutical composition” means a composition formulated for pharmaceutical use. In some embodiments, the pharmaceutical composition further comprises a pharmaceutically acceptable carrier. In some embodiments, the pharmaceutical composition comprises additional agents (e.g., for specific delivery, increasing half-life, or other therapeutic compounds).

[0180] By “Programmed Cell Death-Ligand 1 (PD-L1) polypeptide” is meant a protein having at least about 85% amino acid sequence identity to NCBI Accession No. NP_054862.1, which is provided below, or a fragment thereof capable of modulating an immune response.

| (SEQ ID NO: 467) | |
|---|---|
| 1 | mrifavfifm tywhllnaft vtvpkdlyvv eygsnmtiec kfpvekqldl aalivyweme |
| 61 | dkniiqfvhg eedlkvqhss yrqrarllkd qlslgnaalq itdvklqdag vyrcmisygg |
| 121 | adykritvkv napynkinqr ilvvdpvtse heltcqaegy pkaeviwtss dhqvlsgktt |
| 181 | ttnskreekl fnvtstlrin tttneifyct frrldpeenh taelvipelp lahppnerth |
| 241 | lvilgaillc lgvaltfifr lrkgrmmdvk kcgiqdtnsk kqsdthleet. |

[0181] By “Programmed Cell Death-Ligand 1 (PD-L1) polynucleotide” is meant a nucleic acid molecule encoding an PD-L1 polypeptide, as well as the introns, exons, 3′ untranslated regions, 5′ untranslated regions, and regulatory sequences associated with its expression, or fragments thereof. An exemplary PD-L1 polynucleotide is provided at NCBI Accession No. NM_014143.4, which is provided below.

| (SEQ ID NO: 468) | |
|---|---|
| 1 | agttctgcgc agcttcccga ggctccgcac cagccgcgct tctgtccgcc tgcagggcat |
| 61 | tccagaaaga tgaggatatt tgctgtcttt atattcatga cctactggca tttgctgaac |
| 121 | gcatttactg tcacggttcc caaggaccta tatgtggtag agtatggtag caatatgaca |
| 181 | attgaatgca aattcccagt agaaaaacaa ttagacctgg ctgcactaat tgtctattgg |
| 241 | gaaatggagg ataagaacat tattcaattt gtgcatggag aggaagacct gaaggttcag |
| 301 | catagtagct acagacagag ggcccggctg ttgaaggacc agctctccct gggaaatgct |
| 361 | gcacttcaga tcacagatgt gaaattgcag gatgcagggg tgtaccgctg catgatcagc |
| 421 | tatggtggtg ccgactacaa gcgaattact gtgaaagtca atgccccata caacaaaatc |
| 481 | aaccaaagaa ttttggttgt ggatccagtc acctctgaac atgaactgac atgtcaggct |
| 541 | gagggctacc ccaaggccga agtcatctgg acaagcagtg accatcaagt cctgagtggt |
| 601 | aagaccacca ccaccaattc caagagagag gagaagcttt tcaatgtgac cagcacactg |
| 661 | agaatcaaca caacaactaa tgagattttc tactgcactt ttaggagatt agatcctgag |
| 721 | gaaaaccata cagctgaatt ggtcatccca gaactacctc tggcacatcc tccaaatgaa |
| 781 | aggactcact tggtaattct gggagccatc ttattatgcc ttggtgtagc actgacattc |
| 841 | atcttccgtt taagaaaagg gagaatgatg gatgtgaaaa aatgtggcat ccaagataca |
| 901 | aactcaaaga agcaaagtga tacacatttg gaggagacgt aatccagcat tggaacttct |
| 961 | gatcttcaag cagggattct caacctgtgg tttaggggtt catcggggct gagcgtgaca |
| 1021 | agaggaagga atgggcccgt gggatgcagg caatgtggga cttaaaaggc ccaagcactg |
| 1081 | aaaatggaac ctggcgaaag cagaggagga gaatgaagaa agatggagtc aaacagggag |
| 1141 | cctggaggga gaccttgata ctttcaaatg cctgaggggc tcatcgacgc ctgtgacagg |
| 1201 | gagaaaggat acttctgaac aaggagcctc caagcaaatc atccattgct catcctagga |
| 1261 | agacgggttg agaatcccta atttgagggt cagttcctgc agaagtgccc tttgcctcca |
| 1321 | ctcaatgcct caatttgttt tctgcatgac tgagagtctc agtgttggaa cgggacagta |
| 1381 | tttatgtatg agtttttcct atttattttg agtctgtgag gtcttcttgt catgtgagtg |
| 1441 | tggttgtgaa tgatttcttt tgaagatata ttgtagtaga tgttacaatt ttgtcgccaa |
| 1501 | actaaacttg ctgcttaatg atttgctcac atctagtaaa acatggagta tttgtaaggt |
| 1561 | gcttggtctc ctctataact acaagtatac attggaagca taaagatcaa accgttggtt |
| 1621 | gcataggatg tcacctttat ttaacccatt aatactctgg ttgacctaat cttattctca |
| 1681 | gacctcaagt gtctgtgcag tatctgttcc atttaaatat cagctttaca attatgtggt |
| 1741 | agcctacaca cataatctca tttcatcgct gtaaccaccc tgttgtgata accactatta |
| 1801 | ttttacccat cgtacagctg aggaagcaaa cagattaagt aacttgccca aaccagtaaa |
| 1861 | tagcagacct cagactgcca cccactgtcc ttttataata caatttacag ctatatttta |
| 1921 | ctttaagcaa ttcttttatt caaaaaccat ttattaagtg cccttgcaat atcaatcgct |
| 1981 | gtgccaggca ttgaatctac agatgtgagc aagacaaagt acctgtcctc aaggagctca |
| 2041 | tagtataatg aggagattaa caagaaaatg tattattaca atttagtcca gtgtcatagc |
| 2101 | ataaggatga tgcgagggga aaacccgagc agtgttgcca agaggaggaa ataggccaat |
| 2161 | gtggtctggg acggttggat atacttaaac atcttaataa tcagagtaat tttcatttac |
| 2221 | aaagagaggt cggtacttaa aataaccctg aaaaataaca ctggaattcc ttttctagca |
| 2281 | ttatatttat tcctgatttg cctttgccat ataatctaat gcttgtttat atagtgtctg |
| 2341 | gtattgttta acagttctgt cttttctatt taaatgccac taaattttaa attcatacct |
| 2401 | ttccatgatt caaaattcaa aagatcccat gggagatggt tggaaaatct ccacttcatc |
| 2461 | ctccaagcca ttcaagtttc ctttccagaa gcaactgcta ctgcctttca ttcatatgtt |
| 2521 | cttctaaaga tagtctacat ttggaaatgt atgttaaaag cacgtatttt taaaattttt |
| 2581 | ttcctaaata gtaacacatt gtatgtctgc tgtgtacttt gctattttta tttattttag |
| 2641 | tgtttcttat atagcagatg gaatgaattt gaagttccca gggctgagga tccatgcctt |
| 2701 | ctttgtttct aagttatctt toccatagct tttcattatc tttcatatga tccagtatat |
| 2761 | gttaaatatg tcctacatat acatttagac aaccaccatt tgttaagtat ttgctctagg |
| 2821 | acagagtttg gatttgttta tgtttgctca aaaggagacc catgggctct ccagggtgca |
| 2881 | ctgagtcaat ctagtcctaa aaagcaatct tattattaac tctgtatgac agaatcatgt |
| 2941 | ctggaacttt tttttctgc tttctgtcaa gtataaactt cactttgatg ctgtacttgc |
| 3001 | aaaatcacat tttctttctg gaaattccgg cagtgtacct tgactgctag ctaccctgtg |
| 3061 | ccagaaaagc ctcattcgtt gtgcttgaac ccttgaatgc caccagctgt catcactaca |
| 3121 | cagccctcct aagaggcttc ctggaggttt cgagattcag atgccctggg agatcccaga |
| 3181 | gtttcctttc cctcttggcc atattctggt gtcaatgaca aggagtacct tggctttgcc |
| 3241 | acatgtcaag gctgaagaaa cagtgtctcc aacagagctc cttgtgttat ctgtttgtac |
| 3301 | atgtgcattt gtacagtaat tggtgtgaca gtgttctttg tgtgaattac aggcaagaat |
| 3361 | tgtggctgag caaggcacat agtctactca gtctattcct aagtcctaac tcctccttgt |
| 3421 | ggtgttggat ttgtaaggca ctttatccct tttgtctcat gtttcatcgt aaatggcata |
| 3481 | ggcagagatg atacctaatt ctgcatttga ttgtcacttt ttgtacctgc attaatttaa |
| 3541 | taaaatattc ttatttattt tgttacttgg tacaccagca tgtccatttt cttgtttatt |
| 3601 | ttgtgtttaa taaaatgttc agtttaacat ccca. |

[0182] The terms “protein”, “peptide”, “polypeptide”, and their grammatical equivalents are used interchangeably herein, and refer to a polymer of amino acid residues linked together by peptide (amide) bonds. A protein, peptide, or polypeptide can be naturally occurring, recombinant, or synthetic, or any combination thereof.

[0183] The term “fusion protein” as used herein refers to a hybrid polypeptide which comprises protein domains from at least two different proteins.

[0184] By “rBE4 polypeptide” is meant a polypeptide sharing at least 85% amino acid sequence identity to the below amino acid sequence and having cytidine base editor activity.

(SEQ ID NO: 670)
MSSETGPVAVDPTLRRRIEPHEFEVFFDPRELRKETCLLYEINWGG
RHSIWRHTSQNTNKHVEVNFIEKFTTERYFCPNTRCSITWFLSWS
PCGECSRAITEFLSRYPHVTLFIYIARLYHHADPRNRQGLRDLIS
SGVTIQIMTEQESGYCWRNFVNYSPSNEAHWPRYPHLWVRLYVLE
LYCIILGLPPCLNILRRKQPQLTFFTIALQSCHYQRLPPHILWAT
GLKSGGSSGGSSGSETPGTSESATPESSGGSSGGSDKKYSIGLAI
GTNSVGWAVITDEYKVPSKKFKVLGNTDRHSIKKNLIGALLFDSG
ETAEATRLKRTARRRYTRRKNRICYLQEIFSNEMAKVDDSFFHRL
EESFLVEEDKKHERHPIFGNIVDEVAYHEKYPTIYHLRKKLVDST
DKADLRLIYLALAHMIKFRGHFLIEGDLNPDNSDVDKLFIQLVQT
YNQLFEENPINASGVDAKAILSARLSKSRRLENLIAQLPGEKKNG
LFGNLIALSLGLTPNFKSNFDLAEDAKLQLSKDTYDDDLDNLLAQ
IGDQYADLFLAAKNLSDAILLSDILRVNTEITKAPLSASMIKRYD
EHHQDLTLLKALVRQQLPEKYKEIFFDQSKNGYAGYIDGGASQEE
FYKFIKPILEKMDGTEELLVKLNREDLLRKQRTFDNGSIPHQIHL
GELHAILRRQEDFYPFLKDNREKIEKILTFRIPYYVGPLARGNSR
FAWMTRKSEETITPWNFEEVVDKGASAQSFIERMTNFDKNLPNEK
VLPKHSLLYEYFTVYNELTKVKYVTEGMRKPAFLSGEQKKAIVDL
LFKTNRKVTVKQLKEDYFKKIECFDSVEISGVEDRFNASLGTYHD
LLKIIKDKDFLDNEENEDILEDIVLTLTLFEDREMIEERLKTYAH
LFDDKVMKQLKRRRYTGWGRLSRKLINGIRDKQSGKTILDFLKSD
GFANRNFMQLIHDDSLTFKEDIQKAQVSGQGDSLHEHIANLAGSP
AIKKGILQTVKVVDELVKVMGRHKPENIVIEMARENQTTQKGQKN
SRERMKRIEEGIKELGSQILKEHPVENTQLQNEKLYLYYLQNGRD
MYVDQELDINRLSDYDVDHIVPQSFLKDDSIDNKVLTRSDKNRGK
SDNVPSEEVVKKMKNYWRQLLNAKLITQRKFDNLTKAERGGLSEL
DKAGFIKRQLVETRQITKHVAQILDSRMNTKYDENDKLIREVKVI
TLKSKLVSDFRKDFQFYKVREINNYHHAHDAYLNAVVGTALIKKY
PKLESEFVYGDYKVYDVRKMIAKSEQEIGKATAKYFFYSNIMNFF
KTEITLANGEIRKRPLIETNGETGEIVWDKGRDFATVRKVLSMPQ
VNIVKKTEVQTGGFSKESILPKRNSDKLIARKKDWDPKKYGGFDS
PTVAYSVLVVAKVEKGKSKKLKSVKELLGITIMERSSFEKNPIDF
LEAKGYKEVKKDLIIKLPKYSLFELENGRKRMLASAGELQKGNEL
ALPSKYVNFLYLASHYEKLKGSPEDNEQKQLFVEQHKHYLDEIIE
QISEFSKRVILADANLDKVLSAYNKHRDKPIREQAENIIHLFTLT
NLGAPAAFKYFDTTIDRKRYTSTKEVLDATLIHQSITGLYETRID
LSQLGGDSGGSGGSGGSTNLSDIIEKETGKQLVIQESILMLPEEV
EEVIGNKPESDILVHTAYDESTDENVMLLTSDAPEYKPWALVIQD
SNGENKIKMLSGGSGGSGGSTNLSDIIEKETGKQLVIQESILMLP
EEVEEVIGNKPESDILVHTAYDESTDENVMLLTSDAPEYKPWALV
IQDSNGENKIKMLSGGSKRTADGSEFESPKKKRKVE.

[0185] By “rBE4 polynucleotide” is meant a polynucleotide encoding a rBE4 polypeptide.

[0186] The term “recombinant” as used herein in the context of proteins or nucleic acids refers to proteins or nucleic acids that do not occur in nature, but are the product of human engineering. For example, in some embodiments, a recombinant protein or nucleic acid molecule comprises an amino acid or nucleotide sequence that comprises at least one, at least two, at least three, at least four, at least five, at least six, or at least seven mutations as compared to any naturally occurring sequence.

[0187] By “reduces” is meant a negative alteration of at least 10%, 25%, 50%, 75%, or 100%. In some embodiments, a modified immune cell has a reduction in the level of an immunogenic polypeptide. In embodiments, reduction in the level of an immunogenic polypeptide renders the immunogenic polypeptide undetectable or virtually undetectable. In embodiments, the modified immune cell lacks the immunogenic polypeptide.

[0188] By “reference” is meant a standard or control condition. In one embodiment, the reference is a wild-type or healthy cell. In one embodiment, the reference is an unedited cell or an unedited cell that is allogeneic to a host or subject. In other embodiments and without limitation, a reference is an untreated cell that is not subjected to a test condition, or is subjected to placebo or normal saline, medium, buffer, and/or a control vector that does not harbor a polynucleotide of interest.

[0189] A “reference sequence” is a defined sequence used as a basis for sequence comparison. A reference sequence may be a subset of or the entirety of a specified sequence; for example, a segment of a full-length cDNA or gene sequence, or the complete cDNA or gene sequence. For polypeptides, the length of the reference polypeptide sequence will generally be at least about 16 amino acids, at least about 20 amino acids, at least about 25 amino acids, about 35 amino acids, about 50 amino acids, or about 100 amino acids. For nucleic acids, the length of the reference nucleic acid sequence will generally be at least about 50 nucleotides, at least about 60 nucleotides, at least about 75 nucleotides, about 100 nucleotides or about 300 nucleotides or any integer thereabout or therebetween. In some embodiments, a reference sequence is a wild-type sequence of a protein of interest. In other embodiments, a reference sequence is a polynucleotide sequence encoding a wild-type protein.

[0190] The term “RNA-programmable nuclease,” and “RNA-guided nuclease” refer to a nuclease that forms a complex with (e.g., binds or associates with) one or more RNA(s) that is not a target for cleavage. In some embodiments, an RNA-programmable nuclease, when in a complex with an RNA, may be referred to as a nuclease:RNA complex. Typically, the bound RNA(s) is referred to as a guide RNA (gRNA). In some embodiments, the RNA-programmable nuclease is the (CRISPR-associated system) Cas9 endonuclease, for example, Cas9 (Csn1) from Streptococcus pyogenes (e.g., SEQ ID NO: 197), Cas9 from Neisseria meningitidis (NmeCas9; SEQ ID NO: 208), Nme2Cas9 (SEQ ID NO: 209), or derivatives thereof (e.g. a sequence with at least about 85% sequence identity to a Cas9, such as Nme2Cas9 or spCas9).

[0191] The term “single nucleotide polymorphism (SNP)” is a variation in a single nucleotide that occurs at a specific position in the genome, where each variation is present to some appreciable degree within a population (e.g., >1%). SNPs can fall within coding regions of genes, non-coding regions of genes, or in the intergenic regions (regions between genes). In some embodiments, SNPs within a coding sequence do not necessarily change the amino acid sequence of the protein that is produced, due to degeneracy of the genetic code. SNPs in the coding region are of two types: synonymous and nonsynonymous SNPs. Synonymous SNPs do not affect the protein sequence, while nonsynonymous SNPs change the amino acid sequence of protein. The nonsynonymous SNPs are of two types: missense and nonsense. SNPs that are not in protein-coding regions can still affect gene splicing, transcription factor binding, messenger RNA degradation, or the sequence of noncoding RNA. Gene expression affected by this type of SNP is referred to as an eSNP (expression SNP) and can be upstream or downstream from the gene. A single nucleotide variant (SNV) is a variation in a single nucleotide without any limitations of frequency and can arise in somatic cells. A somatic single nucleotide variation can also be called a single-nucleotide alteration.

[0192] By “specifically binds” is meant a nucleic acid molecule, polypeptide, polypeptide/polynucleotide complex, compound, or molecule that recognizes and binds a polypeptide and/or nucleic acid molecule of the present disclosure, but which does not substantially recognize and bind other molecules in a sample, for example, a biological sample.

[0193] By “substantially identical” is meant a polypeptide or nucleic acid molecule exhibiting at least 50% identity to a reference amino acid sequence. In one embodiment, a reference sequence is a wild-type amino acid or nucleic acid sequence. In another embodiment, a reference sequence is any one of the amino acid or nucleic acid sequences described herein. In one embodiment, such a sequence is at least about 60%, 80%, 85%, 90%, 95%, 96%, 97%, 98%, 99%, 99.9%, or even 99.99% identical at the amino acid level or nucleic acid level to the sequence used for comparison.

[0194] Sequence identity is typically measured using sequence analysis software (for example, Sequence Analysis Software Package of the Genetics Computer Group, University of Wisconsin Biotechnology Center, 1710 University Avenue, Madison, Wis. 53705, BLAST, BESTFIT, GAP, or PILEUP/PRETTYBOX programs). Such software matches identical or similar sequences by assigning degrees of homology to various substitutions, deletions, and/or other modifications. Conservative substitutions typically include substitutions within the following groups: glycine, alanine; valine, isoleucine, leucine; aspartic acid, glutamic acid, asparagine, glutamine; serine, threonine; lysine, arginine; and phenylalanine, tyrosine. In an exemplary approach to determining the degree of identity, a BLAST program may be used, with a probability score between e⁻³ and e⁻¹⁰⁰ indicating a closely related sequence. COBALT is used, for example, with the following parameters:
[0195] a) alignment parameters: Gap penalties-11,-1 and End-Gap penalties-5,-1,
[0196] b) CDD Parameters: Use RPS BLAST on; Blast E-value 0.003; Find Conserved columns and Recompute on, and
[0197] c) Query Clustering Parameters: Use query clusters on; Word Size 4; Max cluster distance 0.8; Alphabet Regular.
   EMBOSS Needle is used, for example, with the following parameters:
[0198] a) Matrix: BLOSUM62;
[0199] b) GAP OPEN: 10;
[0200] c) GAP EXTEND: 0.5;
[0201] d) OUTPUT FORMAT: pair;
[0202] e) END GAP PENALTY: false;
[0203] f) END GAP OPEN: 10; and
[0204] g) END GAP EXTEND: 0.5.

[0205] Nucleic acid molecules useful in the methods of the present disclosure include any nucleic acid molecule that encodes a polypeptide of the present disclosure or a functional fragment thereof. Such nucleic acid molecules need not be 100% identical with an endogenous nucleic acid sequence, but will typically exhibit substantial identity. Polynucleotides having “substantial identity” to an endogenous sequence are typically capable of hybridizing with at least one strand of a double-stranded nucleic acid molecule. Nucleic acid molecules useful in the methods of the present disclosure include any nucleic acid molecule that encodes a polypeptide of the present disclosure or a functional fragment thereof. Such nucleic acid molecules need not be 100% identical with an endogenous nucleic acid sequence, but will typically exhibit substantial identity. Polynucleotides having “substantial identity” to an endogenous sequence are typically capable of hybridizing with at least one strand of a double-stranded nucleic acid molecule. By “hybridize” is meant pair to form a double-stranded molecule between complementary polynucleotide sequences (e.g., a gene described herein), or portions thereof, under various conditions of stringency. (See, e.g., Wahl, G. M. and S. L. Berger (1987) Methods Enzymol. 152:399; Kimmel, A. R. (1987) Methods Enzymol. 152:507).

[0206] For example, stringent salt concentration will ordinarily be less than about 750 mM NaCl and 75 mM trisodium citrate, preferably less than about 500 mM NaCl and 50 mM trisodium citrate, and more preferably less than about 250 mM NaCl and 25 mM trisodium citrate. Low stringency hybridization can be obtained in the absence of organic solvent, e.g., formamide, while high stringency hybridization can be obtained in the presence of at least about 35% formamide, and more preferably at least about 50% formamide. Stringent temperature conditions will ordinarily include temperatures of at least about 30° C., more preferably of at least about 37° C., and most preferably of at least about 42° C. Varying additional parameters, such as hybridization time, the concentration of detergent, e.g., sodium dodecyl sulfate (SDS), and the inclusion or exclusion of carrier DNA, are well known to those skilled in the art. Various levels of stringency are accomplished by combining these various conditions as needed. In a preferred: embodiment, hybridization will occur at 30° C. in 750 mM NaCl, 75 mM trisodium citrate, and 1% SDS. In a more preferred embodiment, hybridization will occur at 37° C. in 500 mM NaCl, 50 mM trisodium citrate, 1% SDS, 35% formamide, and 100 μg/ml denatured salmon sperm DNA (ssDNA). In a most preferred embodiment, hybridization will occur at 42° C. in 250 mM NaCl, 25 mM trisodium citrate, 1% SDS, 50% formamide, and 200 μg/ml ssDNA. Useful variations on these conditions will be readily apparent to those skilled in the art.

[0207] For most applications, washing steps that follow hybridization will also vary in stringency. Wash stringency conditions can be defined by salt concentration and by temperature. As above, wash stringency can be increased by decreasing salt concentration or by increasing temperature. For example, stringent salt concentration for the wash steps will preferably be less than about 30 mM NaCl and 3 mM trisodium citrate, and most preferably less than about 15 mM NaCl and 1.5 mM trisodium citrate. Stringent temperature conditions for the wash steps will ordinarily include a temperature of at least about 25° C., more preferably of at least about 42° C., and even more preferably of at least about 68° C. In an embodiment, wash steps will occur at 25° C. in 30 mM NaCl, 3 mM trisodium citrate, and 0.1% SDS. In another embodiment, wash steps will occur at 42 C in 15 mM NaCl, 1.5 mM trisodium citrate, and 0.1% SDS. In a more preferred embodiment, wash steps will occur at 68° C. in 15 mM NaCl, 1.5 mM trisodium citrate, and 0.1% SDS. Additional variations on these conditions will be readily apparent to those skilled in the art. Hybridization techniques are well known to those skilled in the art and are described, for example, in Benton and Davis (Science 196:180, 1977); Grunstein and Hogness (Proc. Natl. Acad. Sci., USA 72:3961, 1975); Ausubel et al. (Current Protocols in Molecular Biology, Wiley Interscience, New York, 2001); Berger and Kimmel (Guide to Molecular Cloning Techniques, 1987, Academic Press, New York); and Sambrook et al., Molecular Cloning: A Laboratory Manual, Cold Spring Harbor Laboratory Press, New York.

[0208] By “split” is meant divided into two or more fragments.

[0209] A “split Cas9 protein” or “split Cas9” refers to a Cas9 protein that is provided as an N-terminal fragment and a C-terminal fragment encoded by two separate nucleotide sequences. The polypeptides corresponding to the N-terminal portion and the C-terminal portion of the Cas9 protein may be spliced to form a “reconstituted” Cas9 protein.

[0210] By “TAP-associated glycoprotein (Tapasin; TAPBP) polypeptide” is meant a protein having at least about 85% amino acid sequence identity to NCBI Accession No. NP_003181.3, which is provided below, or a fragment thereof capable of modulating an immune response.

```
(SEQ ID NO: 469)
    1 mkslslllav alglatavsa gpaviecwfv
        edasgkglak rpgalllrqg pgeppprpdl
  61 dpelylsvhd pagalqaafr ryprgapaph
        cemsrfvplp asakwasglt paqncprald
121 gawlmvsiss pvlslssllr pqpepqqepv
        litmatvvlt vlthtpaprv rlgqdalldl
181 sfaympptse aasslapgpp pfglewrrqh
        lgkghlllaa tpglngqmpa agegavafaa
241 wdddepwgpw tgngtfwlpt vqpfqegtyl
        atihlpylqg qvtlelavyk ppkvslmpat
301 laraapgeap pellclvshf ypsgglevew
        elrggpggrs qkaegqrwls alrhhsdgsv
361 slsghlqppp vtteqhgary acrihhpslp
        asgrsaevtl evaglsgpsl edsvglflsa
421 flllglfkal gwaavylstc kdskkkae.
```

[0211] By “TAP-associated glycoprotein (Tapasin; TAPBP) polynucleotide” is meant a nucleic acid molecule encoding a Tapasin polypeptide, as well as the introns, exons, 3′ untranslated regions, 5′ untranslated regions, and regulatory sequences associated with its expression, or fragments thereof. An exemplary Tapasin polynucleotide is provided at NCBI Accession No. NM_003190.5, which is provided below.

```
(SEQ ID NO: 470)
      1 gaagaggagg cttcatggct gaggaggtcg
          cagcgccatg aagtccctgt ctctgctcct
    61 cgctgtggct ttgggcctgg cgaccgccgt
          ctcagcagga cccgcggtga tcgagtgttg
  121 gttcgtggag gatgcgagcg gaaagggcct
          ggccaagaga cccggtgcac tgctgttgcg
  181 ccagggaccg ggggaaccgc cgccccggcc
          ggacctcgac cctgagctct atctcagtgt
  241 acacgacccc gcgggcgccc tccaggctgc
          cttcaggcgg tatccccggg gcgcccccgc
  301 accacactgc gagatgagcc gcttcgtgcc
          tctccccgcc tctgcgaaat gggccagcgg
  361 cctgaccccc gcgcagaact gcccgcgggc
          cctggatggg gcttggctga tggtcagcat
  421 atccagccca gtcctcagcc tctccagcct
          cttgcgacca cagccagagc ctcagcagga
  481 gcctgttctc atcaccatgg caacagtggt
          actgactgtc ctcacccaca cccctgcccc
  541 tcgagtgaga ctgggacaag atgctctgct
          ggacttgagc tttgcctaca tgccccccac
  601 ctccgaggcc gcctcatctc tggctccggg
          tccccctccc tttgggctag agtggcgacg
  661 ccagcacctg ggtaagggac atctgctcct
          ggctgcaact cctgggctga atggccagat
  721 gccagcagcc caagaagggg ccgtggcatt
          tgctgcttgg gatgatgatg agccatgggg
  781 cccatggacc ggaaatggga ccttctggct
          gcctacagtt caaccctttc aggagggcac
  841 ctatctggcc accatacacc tgccatacct
          gcaaggacag gtcaccctgg agcttgctgt
  901 gtacaaaccc cccaaagtgt ccctgatgcc
          agcaaccctt gcacgggccg ccccagggga
  961 ggcacccccg gaattgctct gccttgtgtc
          ccacttctac ccttctgggg gcctggaggt
1021 ggagtgggaa ctccggggtg gcccaggggg
          ccgctctcag aaggccgagg ggcagaggtg
1081 gctctcggcc ctgcgccacc attccgatgg
          ctctgtcagc ctctctgggc acttgcagcc
1141 gcccccagtc accactgagc agcatggggc
          acgctatgcc tgtcgaattc accatcccag
1201 cctgcctgcc tcggggcgca gcgctgaggt
          caccctggag gtagcaggtc tttcagggcc
1261 ctcccttgag gacagcgtag gccttttcct
          gtctgccttt cttctgcttg ggctcttcaa
1321 ggcactgggc tgggctgctg tctacctgtc
          cacctgcaag gattcaaaga agaaagcaga
1381 gtgagggcac tcactgccat cctgtggaag
          ccaccatcat ctctggccca agcttctgta
1441 gtagctccct aaaataatac cctatcatct
          gctcctaatc cctccaatct ctctccactg
1501 agtggctgga atgctttttt ttttttcttt
          cacttatata agggataatt tttctttttt
1561 tttttttttt gagacggagt ctcactcttc
          cgcccaggct gcagtgcagt ggcatgatct
1621 tggcttactg caacctccgc ctcctgggtt
          caagcaattc tgtggcttca gcctccggag
1681 tagctgggat tacaggcaca tgccaccaca
          cccagtgaat ttttgtattt ttagtagaga
1741 cggggtttca ccatgttggc caggctggtc
          ttgaattcct gacctcaggt gatctgccca
1801 cctcagcctc ccaaagtgct gggattacag
          gcgtgagcca ccacaccagg cccgagaaat
1861 gcttttttaa aaaacacaca tcttatggca
          ttcaccttct tggagctcta ggacagtggt
1921 tctcaaaatt tttttctctc aggacctctt
          aaaaatcatc aaggacccca aaaagctttt
1981 gggtatgtgg gttatagcta tcaatattta
          tggtactaga acttaaaagt gagaaaaatt
2041 taaaacacga gaatacatag gcacacattc
          tattcatcgt gggaaccatg gtgtcaatac
2101 atatcatgta gcttctgaaa aactccactg
          tacacttata gaatgaagaa ggcaaaaaac
2161 tttttttttt ttttttttga gacggagtct
          cgctctgtcg cccaggctgg agtgcagtgg
2221 cgcgatctcg gctcactgca agctccgcct
          ctcgggttca cgccattctc ctgcctcagc
2281 ctcccaagta gctcggacta caggcgtcct
          ccaccatgcc tggctaatat tttgtatttt
2341 ttagtagaga cggggtttca ccgtgttagc
          caggatggtc tcgatctcct aacctggtga
2401 tccgcccgcc tcggcctccc aaagtattgg
          gattacccgc gtgagccacc gcgcccggct
2461 gcaaataatc tttctttttt tctgagacag
          agtctcgctc tgttgcccag gctggagtgc
2521 agtggcacga tctcggctca cggcacgctc
          cgcctcccgg gttcacgcca ttctcctgcc
2581 tcagcttccc gagtagctgg gactacaggg
          gcccgccacc acgcccggct aactttttgt
2641 gtttttagta gagacggggt ttcaccgtgt
          tagccaggat ggtctcgatc tcctgacctt
2701 gtgatctgcc cgcctcggcc tcccaaagtg
          ctgggattac aggcgtgagc caccgcgccc
2761 ggcggcgaaa cacgatattg tactaacatc
          ttaattttgt tataaaatct cacaaacccc
2821 ctgacatagt ctcagagatc tgtagggccg
          aggttacatt tggagaaccc gtactctagg
2881 gccaaatcca ttcttcttgc cctggctcac
          ttgtcccccc caccgccccg cgctggagcc
2941 actgcctagt tcttcagccc tagatggtgc
          tcgccagacc tcctctcaat gctcatcaca
3001 cacagggcta ttcctttcct ccaatgaacc
          aaacgcctcc cgcccacctc caggtcccag
3061 tcctctgttc cctttgcctg gtccaccctt
          gccctccctg ggtcgcagac gaggtcggcc
3121 tcgtcattcc ccgcagaccg ccgcgcgtcc
          ctcttgtgcg gttcaccaca gttgtattta
3181 agtgatcgtg tgagtcgtcg ttaaatgcct
          gtctccccgc ggatcatggg ctcctcgagg
3241 acagggactg gcctgtctgt ccactgctgt
          aaccccgcgc cggcataggg acctaaggcc
3301 cactggaggg cgctcatcaa gtagctgctg
          gatgttgacg aaggaagcgg cggcgcagct
3361 cagggatctc cgagtcagga cggtcggcca
          gacccacggg gtaacgggtc taatcgtgta
3421 ggaataaagc tgtattccag tgcttccaaa.
The tapasin gene corresponds to
ENSG00000231925, ENSG00000236490,
ENSG00000206281 ENSG00000206208,
and ENSG00000112493.
```

[0212] By “TAP binding protein-like (TAPBPL) polypeptide” is meant a protein having at least about 85% amino acid sequence identity to GenBank Accession No. AAH15017.1, which is provided below, or a fragment thereof having immunomodulatory activity.

>AAH15017.1 TAP binding protein-like
[Homo sapiens]
(SEQ ID NO: 1118)
MGTQEGWCLLLCLALSGAAETKPHPAEGQWRAVDVVLDCFLVKDG
AHRGALASSEDRARASLVLKQVPVLDDGSLEDFTDFQGGTLAQDD
PPIIFEASVDLVQIPQAEALLHADCSGKEVTCEISRYFLQMTETT
VKTAAWFMANVQVSGGGPSISLVMKTPRVAKNEVLWHPTLNLPLS
PQGTVRTAVEFQVMTQTQSLSFLLGSSASLDCGFSMAPGLDLISV
EWRLQHKGRGQLVYSWTAGQGQAVRKGATLEPAQLGMARDASLTL
PGLTIQDEGTYICQITTSLYRAQQIIQLNIQASPKVRLSLANEAL
LPTLICDIAGYYPLDVVVTWTREELGGSPAQVSGASFSSLRQSVA
GTYSISSSLTAEPGSAGATYTCQVTHISLEEPLGASTQVVPPERR
TALGVIFASSLFLLALMFLGLQRRQAPTGLGLLQAERWETTSCAD
TQSSHLHEDRTARVSQPS.

[0213] By “TAP binding protein-like (TAPBPL) polynucleotide” is meant a nucleic acid molecule encoding an TAPBPL polypeptide, as well as the introns, exons, 3′ untranslated regions, 5′ untranslated regions, and regulatory sequences associated with its expression, or fragments thereof. In embodiments, a TAPBPL polynucleotide is the genomic sequence, cDNA, mRNA, or gene associated with and/or required for TAPBPL expression. An exemplary TAPBPL polynucleotide sequence from Homo sapiens is provided at GenBank Accession No. BC015017.2 which is provided below, and at NCBI Ref. Seq. Accession No. NC_000012.12:6451649-6472006, which is provided in the Sequence Listing as SEQ ID NO: 1120.

>BC015017.2 Homo sapiens TAP binding protein-
like, mRNA (cDNA clone MGC: 8836
IMAGE: 3916213), complete cds
(SEQ ID NO: 1119)
GTGAAAGTGAAAGAAAAGTCGGCAGCAGAGGGAACAGGGAAGAAA
CCTAAAGGCTGCAGGCTGCCAGGTGTGCTTGGAGAGCCCCCTTCT
TCCGCCGGGCCTCGCAAGCAGCGTAGGACTGTGGAGAAGGGCGGT
GGGCAAGGAGGGAACTCGAGAGCAGCCTCCATGGGCACACAGGAG
GGCTGGTGCCTGCTGCTCTGCCTGGCTCTATCTGGAGCAGCAGAA
ACCAAGCCCCACCCAGCAGAGGGGCAGTGGCGGGCAGTGGACGTG
GTCCTAGACTGTTTCCTGGTGAAGGACGGTGCGCACCGTGGAGCT
CTCGCCAGCAGTGAGGACAGGGCAAGGGCCTCCCTTGTGCTGAAG
CAGGTGCCAGTGCTGGACGATGGCTCCCTGGAGGACTTCACCGAT
TTCCAAGGGGGCACACTGGCCCAAGATGACCCACCTATTATCTTT
GAGGCCTCAGTGGACCTGGTCCAGATTCCCCAGGCCGAGGCCTTG
CTCCATGCTGACTGCAGTGGGAAGGAGGTGACCTGTGAGATCTCC
CGCTACTTTCTCCAGATGACAGAGACCACTGTTAAGACAGCAGCT
TGGTTCATGGCCAACGTGCAGGTCTCTGGAGGGGGACCTAGCATC
TCCTTGGTGATGAAGACTCCCAGGGTCGCCAAGAATGAGGTGCTC
TGGCACCCAACGCTGAACTTGCCACTGAGCCCCCAGGGGACTGTG
CGAACTGCAGTGGAGTTCCAGGTGATGACACAGACCCAATCCCTG
AGCTTCCTGCTGGGGTCCTCAGCCTCCTTGGACTGTGGCTTCTCC
ATGGCACCGGGCTTGGACCTCATCAGTGTGGAGTGGCGACTGCAG
CACAAGGGCAGGGGTCAGTTGGTGTACAGCTGGACCGCAGGGCAG
GGGCAGGCTGTGCGGAAGGGCGCTACCCTGGAGCCTGCACAACTG
GGCATGGCCAGGGATGCCTCCCTCACCCTGCCCGGCCTCACTATA
CAGGACGAGGGGACCTACATTTGCCAGATCACCACCTCTCTGTAC
CGAGCTCAGCAGATCATCCAGCTCAACATCCAAGCTTCCCCTAAA
GTACGACTGAGCTTGGCAAACGAAGCTCTGCTGCCCACCCTCATC
TGCGACATTGCTGGCTATTACCCTCTGGATGTGGTGGTGACGTGG
ACCCGAGAGGAGCTGGGTGGATCCCCAGCCCAAGTCTCTGGTGCC
TCCTTCTCCAGCCTCAGGCAAAGCGTGGCAGGCACCTACAGCATC
TCCTCCTCTCTCACCGCAGAACCTGGCTCTGCAGGTGCCACTTAC
ACCTGCCAGGTCACACACATCTCTCTGGAGGAGCCCCTTGGGGCC
AGCACCCAGGTTGTCCCACCAGAGCGGAGAACAGCCTTGGGAGTC
ATCTTTGCCAGCAGTCTCTTCCTTCTTGCACTGATGTTCCTGGGG
CTTCAGAGACGGCAAGCACCTACAGGACTTGGGCTGCTTCAGGCT
GAACGCTGGGAGACCACTTCCTGTGCTGACACACAGAGCTCCCAT
CTCCATGAAGACCGCACAGCGCGTGTAAGCCAGCCCAGCTGACCT
AAAGCGACATGAGACTACTAGAAAGAAACGACACCCTTCCCCAAG
CCCCCACAGCTACTCCAACCCAAACAACAACCAAGCCAGTTTAAT
GGTAGGAATTTGTATTTTTTGCCTTTGTTCAGAATACATGACATT
GGTAAATAAAAAAAAAAAAAAAAAAAAAA.

[0214] The term “target site” refers to a sequence within a nucleic acid molecule that is modified. In embodiments, the modification is deamination of a base. The deaminase can be a cytidine or an adenine deaminase. The fusion protein or base editing complex comprising a deaminase may comprise a dCas9-adenosine deaminase fusion protein, a Cas12b-adenosine deaminase fusion, or a base editor disclosed herein.

[0215] By “T Cell Receptor Alpha Constant (TRAC) polypeptide” is meant a protein having at least about 85% amino acid sequence identity to NCBI Accession No. P01848.2, or a fragment thereof having immunomodulatory activity. An exemplary amino acid sequence is provided below.

(SEQ ID NO: 471)
>sp|P01848.2|TRAC_HUMAN RecName:
Full = T cell receptor alpha constant
IQNPDPAVYQLRDSKSSDKSVCLFTDFDSQTNVSQSKDSDVYITD
KTVLDMRSMDFKSNSAVAWSNKSDFACANAFNNSIIPEDTFFPSP
ESSCDVKLVEKSFETDTNLNFQNLSVIGFRILLLKVAGFNLLMTL
RLWSS.

[0216] By “T Cell Receptor Alpha Constant (TRAC) polynucleotide” is meant a nucleic acid molecule encoding a TRAC polypeptide, as well as the introns, exons, 3′ untranslated regions, 5′ untranslated regions, and regulatory sequences associated with its expression, or fragments thereof. An exemplary TRAC polynucleotide is provided at Gene ENSG00000277734.8, which is provided below.

>UCSC human genome database, Gene
ENSG00000277734.8 Human T-cell receptor
alpha chain (TCR-alpha)
(SEQ ID NO: 472)
catgctaatcctccggcaaacctctgtttcctcctcaaaaggcag
gaggtcggaaagaataaacaatgagagtcacattaaaaacacaaa
atcctacggaaatactgaagaatgagtctcagcactaaggaaaag
cctccagcagctcctgctttctgagggtgaaggatagacgctgtg
gctctgcatgactcactagcactctatcacggccatattctggca
gggtcagtggctccaactaacatttgtttggtactttacagttta
ttaaatagatgtttatatggagaagctctcatttctttctcagaa
gagcctggctaggaaggtggatgaggcaccatattcattttgcag
gtgaaattcctgagatgtaaggagctgctgtgacttgctcaaggc
cttatatcgagtaaacggtagtgctggggcttagacgcaggtgtt
ctgatttatagttcaaaacctctatcaatgagagagcaatctcct
ggtaatgtgatagatttcccaacttaatgccaacataccataaac
ctcccattctgctaatgcccagcctaagttggggagaccactcca
gattccaagatgtacagtttgctttgctgggcctttttcccatgc
ctgcctttactctgccagagttatattgctggggttttgaagaag
atcctattaaataaaagaataagcagtattattaagtagccctgc
atttcaggtttccttgagtggcaggccaggcctggccgtgaacgt
tcactgaaatcatggcctcttggccaagattgatagcttgtgcct
gtccctgagtcccagtccatcacgagcagctggtttctaagatgc
tatttcccgtataaagcatgagaccgtgacttgccagccccacag
agccccgcccttgtccatcactggcatctggactccagcctgggt
tggggcaaagagggaaatgagatcatgtcctaaccctgatcctct
tgtcccacagATATCCAGAACCCTGACCCTGCCGTGTACCAGCTG
AGAGACTCTAAATCCAGTGACAAGTCTGTCTGCCTATTCACCGAT
TTTGATTCTCAAACAAATGTGTCACAAAGTAAGGATTCTGATGTG
TATATCACAGACAAAACTGTGCTAGACATGAGGTCTATGGACTTC
AAGAGCAACAGTGCTGTGGCCTGGAGCAACAAATCTGACTTTGCA
TGTGCAAACGCCTTCAACAACAGCATTATTCCAGAAGACACCTTC
TTCCCCAGCCCAGgtaagggcagctttggtgccttcgcaggctgt
ttccttgcttcaggaatggccaggttctgcccagagctctggtca
atgatgtctaaaactcctctgattggtggtctcggccttatccat
tgccaccaaaaccctctttttactaagaaacagtgagccttgttc
tggcagtccagagaatgacacgggaaaaaagcagatgaagagaag
gtggcaggagagggcacgtggcccagcctcagtctctccaactga
gttcctgcctgcctgcctttgctcagactgtttgccccttactgc
tcttctaggcctcattctaagccccttctccaagttgcctctcct
tatttctccctgtctgccaaaaaatctttcccagctcactaagtc
agtctcacgcagtcactcattaacccaccaatcactgattgtgcc
ggcacatgaatgcaccaggtgttgaagtggaggaattaaaaagtc
agatgaggggtgtgcccagaggaagcaccattctagttgggggag
cccatctgtcagctgggaaaagtccaaataacttcagattggaat
gtgttttaactcagggttgagaaaacagctaccttcaggacaaaa
gtcagggaagggctctctgaagaaatgctacttgaagataccagc
cctaccaagggcagggagaggaccctatagaggcctgggacagga
gctcaatgagaaaggagaagagcagcaggcatgagttgaatgaag
gaggcagggccgggtcacagggccttctaggccatgagagggtag
acagtattctaaggacgccagaaagctgttgatcggcttcaagca
ggggagggacacctaatttgcttttcttttttttttttttttttt
tttttttttttgagatggagttttgctcttgttgcccaggctgga
gtgcaatggtgcatcttggctcactgcaacctccgcctcccaggt
tcaagtgattctcctgcctcagcctcccgagtagctgagattaca
ggcacccgccaccatgcctggctaattttttgtatttttagtaga
gacagggtttcactatgttggccaggctggtctcgaactcctgac
ctcaggtgatccacccgcttcagcctcccaaagtgctgggattac
aggcgtgagccaccacacccggcctgcttttcttaaagatcaatc
tgagtgctgtacggagagtgggttgtaagccaagagtagaagcag
aaagggagcagttgcagcagagagatgatggaggcctgggcaggg
tggtggcagggaggtaaccaacaccattcaggtttcaaaggtaga
accatgcagggatgagaaagcaaagaggggatcaaggaaggcagc
tggattttggcctgagcagctgagtcaatgatagtgccgtttact
aagaagaaaccaaggaaaaaatttggggtgcagggatcaaaactt
tttggaacatatgaaagtacgtgtttatactctttatggcccttg
tcactatgtatgcctcgctgcctccattggactctagaatgaagc
caggcaagagcagggtctatgtgtgatggcacatgtggccagggt
catgcaacatgtactttgtacaaacagtgtatattgagtaaatag
aaatggtgtccaggagccgaggtatcggtcctgccagggccaggg
gctctccctagcaggtgctcatatgctgtaagttccctccagatc
tctccacaaggaggcatggaaaggctgtagttgttcacctgccca
agaactaggaggtctggggtgggagagtcagcctgctctggatgc
tgaaagaatgtctgtttttccttttagAAAGTTCCTGTGATGTCA
AGCTGGTCGAGAAAAGCTTTGAAACAGgtaagacaggggtctagc
ctgggtttgcacaggattgcggaagtgatgaacccgcaataaccc
tgcctggatgagggagtgggaagaaattagtagatgtgggaatga
atgatgaggaatggaaacagcggttcaagacctgcccagagctgg
gtggggtctctcctgaatccctctcaccatctctgactttccatt
ctaagcactttgaggatgagtttctagcttcaatagaccaaggac
tctctcctaggcctctgtattcctttcaacagctccactgtcaag
agagccagagagagcttctgggtggcccagctgtgaaatttctga
gtcccttagggatagccctaaacgaaccagatcatcctgaggaca
gccaagaggttttgccttctttcaagacaagcaacagtactcaca
taggctgtgggcaatggtcctgtctctcaagaatcccctgccact
cctcacacccaccctgggcccatattcatttccatttgagttgtt
cttattgagtcatccttcctgtggtagcggaactcactaaggggc
ccatctggacccgaggtattgtgatgataaattctgagcacctac
cccatccccagaagggctcagaaataaaataagagccaagtctag
tcggtgtttcctgtcttgaaacacaatactgttggccctggaaga
atgcacagaatctgtttgtaaggggatatgcacagaagctgcaag
ggacaggaggtgcaggagctgcaggcctcccccacccagcctgct
ctgccttggggaaaaccgtgggtgtgtcctgcaggccatgcaggc
ctgggacatgcaagcccataaccgctgtggcctcttggttttaca
gATACGAACCTAAACTTTCAAAACCTGTCAGTGATTGGGTTCCGA
ATCCTCCTCCTGAAAGTGGCCGGGTTTAATCTGCTCATGACGCTG
CGGCTGTGGTCCAGCTGAGgtgaggggccttgaagctgggagtgg
ggtttagggacgcgggtctctgggtgcatcctaagctctgagagc
aaacctccctgcagggtcttgcttttaagtccaaagcctgagccc
accaaactctcctacttcttcctgttacaaattcctcttgtgcaa
taataatggcctgaaacgctgtaaaatatcctcatttcagccgcc
tcagttgcacttctcccctatgaggtaggaagaacagttgtttag
aaacgaagaaactgaggccccacagctaatgagtggaggaagaga
gacacttgtgtacaccacatgccttgtgttgtacttctctcaccg
tgtaacctcctcatgtcctctctccccagtacggctctcttagct
cagtagaaagaagacattacactcatattacaccccaatcctggc
tagagtctccgcaccctcctcccccagggtccccagtcgtcttgc
tgacaactgcatcctgttccatcaccatcaaaaaaaaactccagg
ctgggtgcgggggctcacacctgtaatcccagcactttgggaggc
agaggcaggaggagcacaggagctggagaccagcctgggcaacac
agggagaccccgcctctacaaaaagtgaaaaaattaaccaggtgt
ggtgctgcacacctgtagtcccagctacttaagaggctgagatgg
gaggatcgcttgagccctggaatgttgaggctacaatgagctgtg
attgcgtcactgcactccagcctggaagacaaagcaagatcctgt
ctcaaataataaaaaaaataagaactccagggtacatttgctcct
agaactctaccacatagccccaaacagagccatcaccatcacatc
cctaacagtcctgggtcttcctcagtgtccagcctgacttctgtt
cttcctcattccagATCTGCAAGATTGTAAGACAGCCTGTGCTCC
CTCGCTCCTTCCTCTGCATTGCCCCTCTTCTCCCTCTCCAAACAG
AGGGAACTCTCCTACCCCCAAGGAGGTGAAAGCTGCTACCACCTC
TGTGCCCCCCCGGCAATGCCACCAACTGGATCCTACCCGAATTTA
TGATTAAGATTGCTGAAGAGCTGCCAAACACTGCTGCCACCCCCT
CTGTTCCCTTATTGCTGCTTGTCACTGCCTGACATTCACGGCAGA
GGCAAGGCTGCTGCAGCCTCCCCTGGCTGTGCACATTCCCTCCTG
CTCCCCAGAGACTGCCTCCGCCATCCCACAGATGATGGATCTTCA
GTGGGTTCTCTTGGGCTCTAGGTCCTGCAGAATGTTGTGAGGGGT
TTATTTTTTTTTAATAGTGTTCATAAAGAAATACATAGTATTCTT
CTTCTCAAGACGTGGGGGGAAATTATCTCATTATCGAGGCCCTGC
TATGCTGTGTATCTGGGCGTGTTGTATGTCCTGCTGCCGATGCCT
TCATTAAAATGATTTGGAAGAGCAGA.

[0217] Nucleotides in lower case above are untranslated regions or introns, and nucleotides in upper cases are exons.

>X02592.1 Human mRNA for T-cell receptor
alpha chain (TCR-alpha)
(SEQ ID NO: 473)
TTTTGAAACCCTTCAAAGGCAGAGACTTGTCCAGCCTAACCTGCC
TGCTGCTCCTAGCTCCTGAGGCTCAGGGCCCTTGGCTTCTGTCCG
CTCTGCTCAGGGCCCTCCAGCGTGGCCACTGCTCAGCCATGCTCC
TGCTGCTCGTCCCAGTGCTCGAGGTGATTTTTACCCTGGGAGGAA
CCAGAGCCCAGTCGGTGACCCAGCTTGGCAGCCACGTCTCTGTCT
CTGAAGGAGCCCTGGTTCTGCTGAGGTGCAACTACTCATCGTCTG
TTCCACCATATCTCTTCTGGTATGTGCAATACCCCAACCAAGGAC
TCCAGCTTCTCCTGAAGTACACATCAGCGGCCACCCTGGTTAAAG
GCATCAACGGTTTTGAGGCTGAATTTAAGAAGAGTGAAACCTCCT
TCCACCTGACGAAACCCTCAGCCCATATGAGCGACGCGGCTGAGT
ACTTCTGTGCTGTGAGTGATCTCGAACCGAACAGCAGTGCTTCCA
AGATAATCTTTGGATCAGGGACCAGACTCAGCATCCGGCCAAATA
TCCAGAACCCTGACCCTGCCGTGTACCAGCTGAGAGACTCTAAAT
CCAGTGACAAGTCTGTCTGCCTATTCACCGATTTTGATTCTCAAA
CAAATGTGTCACAAAGTAAGGATTCTGATGTGTATATCACAGACA
AAACTGTGCTAGACATGAGGTCTATGGACTTCAAGAGCAACAGTG
CTGTGGCCTGGAGCAACAAATCTGACTTTGCATGTGCAAACGCCT
TCAACAACAGCATTATTCCAGAAGACACCTTCTTCCCCAGCCCAG
AAAGTTCCTGTGATGTCAAGCTGGTCGAGAAAAGCTTTGAAACAG
ATACGAACCTAAACTTTCAAAACCTGTCAGTGATTGGGTTCCGAA
TCCTCCTCCTGAAAGTGGCCGGGTTTAATCTGCTCATGACGCTGC
GGCTGTGGTCCAGCTGAGATCTGCAAGATTGTAAGACAGCCTGTG
CTCCCTCGCTCCTTCCTCTGCATTGCCCCTCTTCTCCCTCTCCAA
ACAGAGGGAACTCTCCTACCCCCAAGGAGGTGAAAGCTGCTACCA
CCTCTGTGCCCCCCCGGTAATGCCACCAACTGGATCCTACCCGAA
TTTATGATTAAGATTGCTGAAGAGCTGCCAAACACTGCTGCCACC
CCCTCTGTTCCCTTATTGCTGCTTGTCACTGCCTGACATTCACGG
CAGAGGCAAGGCTGCTGCAGCCTCCCCTGGCTGTGCACATTCCCT
CCTGCTCCCCAGAGACTGCCTCCGCCATCCCACAGATGATGGATC
TTCAGTGGGTTCTCTTGGGCTCTAGGTCCTGGAGAATGTTGTGAG
GGGTTTATTTTTTTTTAATAGTGTTCATAAAGAAATACATAGTAT
TCTTCTTCTCAAGACGTGGGGGGAAATTATCTCATTATCGAGGCC
CTGCTATGCTGTGTGTCTGGGCGTGTTGTATGTCCTGCTGCCGAT
GCCTTCATTAAAATGATTTGGAA.

[0218] By “Transporter associated with antigen processing I (TAP1) polypeptide” is meant a protein having at least about 85% amino acid sequence identity to NCBI Accession No. NP_000584.3, which is provided below, or a fragment thereof capable of modulating an immune response.

```
(SEQ ID NO: 474)
    1 massrcpapr gcrclpgasl awlgtvllll
        adwvllrtal prifsllvpt alpllrvwav
  61 glsrwavlwl gacgvlratv gsksenagaq
        gwlaalkpla aalglalpgl alfreliswg
121 apgsadstrl lhwgshptaf vvsyaaalpa
        aalwhklgsl wvpgggggsg npvrrllgcl
181 gsetrrlslf lvlvvlsslg emaipfftgr
        ltdwilqdgs adtftrnltl msiltiasav
241 lefvgdgiyn ntmghvhshl qgevfgavlr
        qeteffqqnq tgnimsrvte dtstlsdsls
301 enlslflwyl vrglcllgim lwgsvsltmv
        tlitlpllfl lpkkvgkwyq llevqvresl
361 akssqvaiea lsamptvrsf aneegeaqkf
        reklqeiktl nqkeavayav nswttsisgm
421 llkvgilyig gqlvtsgavs sgnlvtfvly
        qmqftqavev llsiyprvqk avgssekife
481 yldrtprcpp sglltplhle glvqfqdvsf
        aypnrpdvlv lqgltftlrp gevtalvgpn
541 gsgkstvaal lqnlyqptgg qllldgkplp
        qyehrylhrq vaavgqepqv fgrslqenia
601 ygltqkptme eitaaavksg ahsfisglpq
        gydtevdeag sqlsggqrqa valaralirk
661 pcvlilddat saldansqlq veqllyespe
        rysrsvllit qhlslvegad hilfleggai
721 reggthqqlm ekkgcywamv qapadape.
```

[0219] By “Transporter associated with antigen processing I (TAP1) polynucleotide” is meant a nucleic acid molecule encoding a TAP1 polypeptide, as well as the introns, exons, 3′ untranslated regions, 5′ untranslated regions, and regulatory sequences associated with its expression, or fragments thereof. An exemplary TAP1 polynucleotide is provided at NCBI Accession No. NM_000593.6, which is provided below.

```
(SEQ ID NO: 475)
      1 gcttcaggcc ccaccggggc gcggagagtc
          ccaggcccgg ccgggaccgg gacggcgtcc
    61 gagtgccaat ggctagctct aggtgtcccg
          ctccccgcgg gtgccgctgc ctccccggag
  121 cttctctcgc atggctgggg acagtactgc
          tacttctcgc cgactgggtg ctgctccgga
  181 ccgcgctgcc ccgcatattc tccctgctgg
          tgcccaccgc gctgccactg ctccgggtct
  241 gggcggtggg cctgagccgc tgggccgtgc
          tctggctggg ggcctgcggg gtcctcaggg
  301 caacggttgg ctccaagagc gaaaacgcag
          gtgcccaggg ctggctggct gctttgaagc
  361 cattagctgc ggcactgggc ttggccctgc
          cgggacttgc cttgttccga gagctgatct
  421 catggggagc ccccgggtcc gcggatagca
          ccaggctact gcactgggga agtcacccta
  481 ccgccttcgt tgtcagttat gcagcggcac
          tgcccgcagc agccctgtgg cacaaactcg
  541 ggagcctctg ggtgcccggc ggtcagggcg
          gctctggaaa ccctgtgcgt cggcttctag
  601 gctgcctggg ctcggagacg cgccgcctct
          cgctgttcct ggtcctggtg gtcctctcct
  661 ctcttgggga gatggccatt ccattcttta
          cgggccgcct cactgactgg attctacaag
  721 atggctcagc cgataccttc actcgaaact
          taactctcat gtccattctc accatagcca
  781 gtgcagtgct ggagttcgtg ggtgacggga
          tctataacaa caccatgggc cacgtgcaca
  841 gccacttgca gggagaggtg tttggggctg
          tcctgcgcca ggagacggag tttttccaac
  901 agaaccagac aggtaacatc atgtctcggg
          taacagagga cacgtccacc ctgagtgatt
  961 ctctgagtga gaatctgagc ttatttctgt
          ggtacctggt gcgaggccta tgtctcttgg
1021 ggatcatgct ctggggatca gtgtccctca
          ccatggtcac cctgatcacc ctgcctctgc
1081 ttttccttct gcccaagaag gtgggaaaat
          ggtaccagtt gctggaagtg caggtgcggg
1141 aatctctggc aaagtccagc caggtggcca
          ttgaggctct gtcggccatg cctacagttc
1201 gaagctttgc caacgaggag ggcgaagccc
          agaagtttag ggaaaagctg caagaaataa
1261 agacactcaa ccagaaggag gctgtggcct
          atgcagtcaa ctcctggacc actagtattt
1321 caggtatgct gctgaaagtg ggaatcctct
          acattggtgg gcagctggtg accagtgggg
1381 ctgtaagcag tgggaacctt gtcacatttg
          ttctctacca gatgcagttc acccaggctg
1441 tggaggtact gctctccatc taccccagag
          tacagaaggc tgtgggctcc tcagagaaaa
1501 tatttgagta cctggaccgc acccctcgct
          gcccacccag tggtctgttg actcccttac
1561 acttggaggg ccttgtccag ttccaagatg
          tctcctttgc ctacccaaac cgcccagatg
1621 tcttagtgct acaggggctg acattcaccc
          tacgccctgg cgaggtgacg gcgctggtgg
1681 gacccaatgg gtctgggaag agcacagtgg
          ctgccctgct gcagaatctg taccagccca
1741 ccgggggaca gctgctgttg gatgggaagc
          cccttcccca atatgagcac cgctacctgc
1801 acaggcaggt ggctgcagtg ggacaagagc
          cacaggtatt tggaagaagt cttcaagaaa
1861 atattgccta tggcctgacc cagaagccaa
          ctatggagga aatcacagct gctgcagtaa
1921 agtctggggc ccatagtttc atctctggac
          tccctcaggg ctatgacaca gaggtagacg
1981 aggctgggag ccagctgtca gggggtcagc
          gacaggcagt ggcgttggcc cgagcattga
2041 tccggaaacc gtgtgtactt atcctggatg
          atgccaccag tgccctggat gcaaacagcc
2101 agttacaggt ggagcagctc ctgtacgaaa
          gccctgagcg gtactcccgc tcagtgcttc
2161 tcatcaccca gcacctcagc ctggtggagc
          aggctgacca catcctcttt ctggaaggag
2221 gcgctatccg ggagggggga acccaccagc
          agctcatgga gaaaaagggg tgctactggg
2281 ccatggtgca ggctcctgca gatgctccag
          aatgaaagcc ttctcagacc tgcgcactcc
2341 atctccctcc cttttcttct ctctgtggtg
          gagaaccaca gctgcagagt aggcagctgc
2401 ctccaggatg agttacttga aatttgcctt
          gagtgtgtta cctcctttcc aagctcctcg
2461 tgataatgca gacttcctgg agtacaaaca
          caggatttgt aattccttac tgtaacggag
2521 tttagagcca gggctgatgc tttggtgtgg
          ccagcactct gaaactgaga aatgttcaga
2581 atgtacggaa agatgatcag ctattttcaa
          cataactgaa ggcatatgct ggcccataaa
2641 caccctgtag gttcttgata tttataataa
          aattggtgtt ttgta.
The TAP1 gene corresponds to Ensembl:
ENSG00000168394.
```

[0220] By “Transporter associated with antigen processing II (TAP2) polypeptide” is meant a protein having at least about 85% amino acid sequence identity to NCBI Accession No. NP_000535.3, which is provided below, or a fragment thereof capable of modulating an immune response.

(SEQ ID NO: 476)

| | |
|---|---|
| 1 | mrlpdlrpwt slllvdaall wllqgplgtl |
| | lpqglpglwl egtlrlgglw gllklrgllg |
| 61 | fvgtlllplc latpltvslr alvagasrap |
| | parvasapws wllvgygaag lswslwavls |
| 121 | ppgagekeqd qvnnkvlmwr llklsrpdlp |
| | llvaaffflv lavlgetlip hysgrvidil |
| 181 | ggdfdphafa saiffmclfs fgsslsager |
| | ggcftytmsr inlrireqlf ssllrqdlgf |
| 241 | fqetktgeln srlssdttlm snwlplnanv |
| | llrslvkvvg lygfmlsisp rltllsllhm |
| 301 | pftiaaekvy ntrhqevlre iqdavaragq |
| | vvreavgglq tvrsfgaeeh evcrykeale |
| 361 | qcrqlywrrd leralyllvr rvlhlgvqml |
| | mlscglqqmq dgeltqgsll sfmiyqesvg |
| 421 | syvqtlvyiy gdmlsnvgaa ekvfsymdrq |
| | pnlpspgtla pttlqgvvkf qdvsfaypnr |
| 481 | pdrpvlkglt ftlrpgevta lvgpngsgks |
| | tvaallqnly qptggqvlld ekpisqyehc |
| 541 | ylhsqvvsvg qepvlfsgsv rnniayglqs |
| | ceddkvmaaa qaahaddfiq emehgiytdv |
| 601 | gekgsqlaag qkqrlaiara lvrdprvlil |
| | deatsaldvq ceqalqdwns rgdrtvlvia |
| 661 | hrlqavqrah qilvlqegkl qklaqlqegq |
| | dlysrlvqqr lmd. |

[0221] By “Transporter associated with antigen processing II (TAP2) polynucleotide” is meant a nucleic acid molecule encoding a TAP2 polypeptide, as well as the introns, exons, 3′ untranslated regions, 5′ untranslated regions, and regulatory sequences associated with its expression, or fragments thereof. An exemplary TAP2 polynucleotide is provided at NCBI Accession No. NM_000544.3, which is provided below.

| (SEQ ID NO: 477) | |
|---|---|
| 1 | gcccgccctg gccgagcgta gctggcggac cagagccggt agcgaggttg ggagagacgg |
| 61 | agcggacctc agcgctgaag cagaagtccc cggagctgcg gtctccccgc cgcggctgag |
| 121 | ccatgcggct ccctgacctg agaccctgga cctccctgct gctggtggac gcggctttac |
| 181 | tgtggctgct tcagggccct ctggggactt tgcttcctca agggctgcca ggactatggc |
| 241 | tggaggggac cctgcggctg ggagggctgt gggggctgct aaagctaaga gggctgctgg |
| 301 | gatttgtggg gacactgctg ctcccgctct gtctggccac ccccctgact gtctccctga |
| 361 | gagccctggt cgcgggggcc tcacgtgctc ccccagccag agtcgcttca gccccttgga |
| 421 | gctggctgct ggtggggtac ggggctgcgg ggctcagctg gtcactgtgg gctgttctga |
| 481 | gccctcctgg agcccaggag aaggagcagg accaggtgaa caacaaagtc ttgatgtgga |
| 541 | ggctgctgaa gctctccagg ccggacctgc ctctcctcgt tgccgccttc ttcttccttg |
| 601 | tccttgctgt tttgggtgag acattaatcc ctcactattc tggtcgtgtg attgacatcc |
| 661 | tgggaggtga ttttgacccc catgcctttg ccagtgccat cttcttcatg tgcctcttct |
| 721 | cctttggcag ctcactgtct gcaggctgcc gaggaggctg cttcacctac accatgtctc |
| 781 | gaatcaactt gcggatccgg gagcagcttt tctcctccct gctgcgccag gacctcggtt |
| 841 | tcttccagga gactaagaca ggggagctga actcacggct gagctcggat accaccctga |
| 901 | tgagtaactg gcttccttta aatgccaatg tgctcttgcg aagcctggtg aaagtggtgg |
| 961 | ggctgtatgg cttcatgctc agcatatcgc ctcgactcac cctcctttct ctgctgcaca |
| 1021 | tgcccttcac aatagcagcg gagaaggtgt acaacacccg ccatcaggaa gtgcttcggg |
| 1081 | agatccagga tgcagtggcc agggcggggc aggtggtgcg ggaagccgtt ggagggctgc |
| 1141 | agaccgttcg cagttttggg gccgaggagc atgaagtctg tcgctataaa gaggcccttg |
| 1201 | aacaatgtcg gcagctgtat tggcggagag acctggaacg cgccttgtac ctgctcgtaa |
| 1261 | ggagggtgct gcacttgggg gtgcagatgc tgatgctgag ctgtgggctg cagcagatgc |
| 1321 | aggatgggga gctcacccag ggcagcctgc tttcctttat gatctaccag gagagcgtgg |
| 1381 | ggagctatgt gcagaccctg gtatacatat atggggatat gctcagcaac gtgggagctg |
| 1441 | cagagaaggt tttctcctac atggaccgac agccaaatct gccttcacct ggcacgcttg |
| 1501 | cccccaccac tctgcagggg gttgtgaaat tccaagacgt ctcctttgca tatcccaatc |
| 1561 | gccctgacag gcctgtgctc aaggggctga cgtttaccct acgtcctggt gaggtgacgg |
| 1621 | cgctggtggg acccaatggg tctgggaaga gcacagtggc tgccctgctg cagaatctgt |
| 1681 | accagcccac agggggacag gtgctgctgg atgaaaagcc catctcacag tatgaacact |
| 1741 | gctacctgca cagccaggtg gtttcagttg ggcaggagcc tgtgctgttc tccggttctg |
| 1801 | tgaggaacaa cattgcttat gggctgcaga gctgcgaaga tgataaggtg atggcggctg |
| 1861 | cccaggctgc ccacgcagat gacttcatcc aggaaatgga gcatggaata tacacagatg |
| 1921 | taggggagaa gggaagccag ctggctgcgg gacagaaaca acgtctggcc attgcccggg |
| 1981 | cccttgtacg agacccgcgg gtcctcatcc tggatgaggc tactagtgcc ctagatgtgc |
| 2041 | agtgcgagca ggccctgcag gactggaatt cccgtgggga tcgcacagtg ctggtgattg |
| 2101 | ctcacaggct gcaggcagtt cagcgcgccc accagatcct ggtgctccag gagggcaagc |
| 2161 | tgcagaagct tgcccagctc caggagggac aggacctcta ttcccgcctg gttcagcagc |
| 2221 | ggctgatgga ctgaggcccc agggatactg ggccctcttc tcaggggcgt ctccaggacc |
| 2281 | cagagctgtt cctgctttga gtttccctag agctgtgcgg ccagatagct gttcctgagt |
| 2341 | tgcaggcacg atggagattt ggacactgtg tgcttttggt ggggtagaga ggtggggtgg |
| 2401 | ggtggggtgg gggctgtctg tgtccaggaa acttaattcc ctggtgacta gagctttgcc |
| 2461 | tggtgatgag gagtattttg tggcataata catatatttt aaaatatttt ccttcttaca |
| 2521 | tgaactgtat acattcatat agaaaattta gacaatataa aaaagtacaa agaagaaaag |
| 2581 | taaaagtacc cattgtttca cttcctggag ataaccatag ttgctatttt gctgcctgtc |
| 2641 | ccatcagtcg tttatctgtt gtttgagata gaaattaacc aaaaatgaca taaatattca |
| 2701 | tgagattgcc ttcctatatc cttccttgtt cctaccagtg tctgctattt tgaagaagct |
| 2761 | agggtctgga gggacagaga acagttccct gattaacagt attaatagcg acattggtaa |
| 2821 | cagctaccat ttatagagtt ttaatgggag taggagctat gctaagtgtt tttcatgtat |
| 2881 | tatcgttttt aatcattatc cccaacccta tgaggttggt tattatcccc attttacaga |
| 2941 | tgaggaaact gaagctcaaa gaggctcaat gactttccca aggtggtcgt agtggtggag |
| 3001 | ttggagtttg aacacaggcc tgaccctaga gtccacaccc tgacccaatc aattatattg |
| 3061 | catcttgggt ccataaaccc taatccataa tcccatcaag aaaagctctg ctgctcttag |
| 3121 | ctctaaataa ttcagaatct attctcttct ctccagtccc gttgttatag tcttcactca |
| 3181 | tagacttaag atgatcccat caccagagag gtttctctac cattagcttc cctcttccgg |
| 3241 | ccattcttca caaagtcatt tttctaaatt ctgtgtcaca tacgatgatg gcatttctgg |
| 3301 | aaattccttc aggtgctctc aagccctgct gcagagatcc ttttcagagc acacactgtt |
| 3361 | ccagcccatc tgtctcaccc tctcctgttg tatccagctc cacgacaaac ttctgccttc |
| 3421 | cccaacacct ttgtgccttt gcatatggtg ttttcttgcc cattttctgc tcgactcgcc |
| 3481 | cctgattttc aagttcaaga cttaactcag ggttcaggtc ttccaggagg ccttacttat |
| 3541 | gtcgtcagtc tggggaactc tccatgtgct tctatcactg tgcggttacc tctttcacag |
| 3601 | cccttttaaa gttctatctt ccctttccca ccttttttga ccttccacta gaccatgagc |
| 3661 | acctgggcgg aaagccatat atcttattaa gctttatatc tgctacctgg ccgagggcct |
| 3721 | aattcatagt ggagaataaa tagtcaattg aataaatgaa taaatatctc caccatcgta |
| 3781 | ctaatcttaa tcctccctgc ccactcccac cactgaaaat gcaacattgt acacatcact |
| 3841 | ggttgttggg agggacttac cttggaaagt tgctattcta ggaaagagaa accttcatat |
| 3901 | tcctggaaac agcaggtagt ttccagtgct ggcaatgaat tccccagaac tgctgttttg |
| 3961 | gattttttct tgcctggcag ctgttgggag cagggtgcag tgaggatggg gtgagagtgg |
| 4021 | gcagtttctt gtgcagattt gcctttcttt catcctgggg ctgacttgca gctccacacc |
| 4081 | catccatctc tcaaatttca cagagggtaa aataggcatt tggagagaaa gaactctggc |
| 4141 | ctgattcctt tctctcccac aaatgtcctt tattcataaa acaggaataa taattcctgt |
| 4201 | atctcccaac tacatggaag ctgcagccct cacagaagaa gatgatctga gaaattcttt |
| 4261 | gatttcctca gtacagttat acccatgcat cataatactt taagcctgga aggcatctta |
| 4321 | aaaataatgc aacagtcaaa cctaatttta cagagaaact gacatgaaat cacgcagcta |
| 4381 | atcatgataa agctgggtgg aaaacttatc ttgatgggca gtacaggaag atgcagtaga |
| 4441 | ccttaagatg tcctgaaagt ttcttatctc aggggaaact cccaggtagg ctttatgtca |
| 4501 | gggacacaga aaaatgctcc ctgaaagtca aaatattcgg gctagacaga caaattcctg |
| 4561 | taagtgtggt ttgtctggga accacagatg tcactaatcc tggtttgctc cagagttctt |
| 4621 | tttgttcact cctacccccc atcaccattt gattgatctc cttaccctgt aatttcccct |
| 4681 | tcttgtcgct tacctgcagt atctttccca cccaggcatg ccttattctt tctaaaggaa |
| 4741 | agtatgaatg gagaggggaa agcttgggaa actgatagat ttccttggat gccaaaacac |
| 4801 | ctccatagcc tgtctgcccg gccctatgtg gaaacagcat tgagtttcaa gtcctttatg |
| 4861 | cctccaccca gggatagcca cttgtaatcc acatggcaat tgtgaaacaa gcaggaaatg |
| 4921 | cgtaattgtc agaattttgt ggggaaagga ctagggaata aggaaaacaa agatcttcct |
| 4981 | tgtgttttag agctgtcagc tagaggagca cctgcttgag tctgatgcca tctaatggtc |
| 5041 | ccagaagaaa ctgggttttg aacctagagt tccatggact cttaggaatt agactactac |
| 5101 | tactactaag cattcactgg tgcttactat gtgctattgc tgtgccaagt atctgaaacc |
| 5161 | tgtcttctta ccttattttt caagataatt ctatgtggca ggtattacta tctcaattct |
| 5221 | aagagtgaga aaatggagtt ttagaaacat ttactaactt gcctgggtca catagctaag |
| 5281 | gaagaggtgg acttgcccag ctttgcataa aactcctcaa aagagttgcc tatactccct |
| 5341 | gactccactt atcttcctac tatcctcttt ttaaaatata ttatttattt atttaaataa |
| 5401 | gcaatatatg aatgtggttt gaaattcaaa agacacaaag aagtatacag aggaaagcct |
| 5461 | cactctcaat ccttctcaag gtttgctaat tcctcttgca taggcaatcc gttcttccag |
| 5521 | ctttgtgttt atctttccag agaagtttac tgtgtattaa gcaaatatgt atatctttat |
| 5581 | tcttgctcag tattttcgca aacagcagct gtctaagttc actgttctga actttatttt |
| 5641 | ttaaattaaa aatatatggc tatgtagtat tctatttta. |

The TAP2 gene corresponds to Ensembl: ENSG00000204267.

[0222] As used herein, the terms “treat,” treating,” “treatment,” and the like refer to reducing or ameliorating a disorder and/or symptoms associated therewith or obtaining a desired pharmacologic and/or physiologic effect. It will be appreciated that, although not precluded, treating a disorder or condition does not require that the disorder, condition or symptoms associated therewith be completely eliminated. In some embodiments, the effect is therapeutic, i.e., without limitation, the effect partially or completely reduces, diminishes, abrogates, abates, alleviates, decreases the intensity of, or cures a disease and/or adverse symptom attributable to the disease. In some embodiments, the effect is preventative, i.e., the effect protects or prevents an occurrence or reoccurrence of a disease or condition. To this end, the presently disclosed methods comprise administering a therapeutically effective amount of a composition as described herein.

[0223] By “uracil glycosylase inhibitor” or “UGI” is meant an agent that inhibits the uracil-excision repair system. Base editors comprising a cytidine deaminase convert cytosine to uracil, which is then converted to thymine through DNA replication or repair. In various embodiments, a uracil DNA glycosylase (UGI) prevent base excision repair which changes the U back to a C.

[0224] In some instances, contacting a cell and/or polynucleotide with a UGI and a base editor prevents base excision repair which changes the U back to a C. An exemplary UGI comprises an amino acid sequence as follows: >splP14739IUNGI_BPPB2 Uracil-DNA glycosylase inhibitor MTNLSDIIEKETGKQLVIQESILMLPEEVEEVIGNKPESDILVHTAYDESTDENVMLLTSD APEYKPWALVIQDSNGENKIKML (SEQ ID NO: 231). In some embodiments, the agent inhibiting the uracil-excision repair system is a uracil stabilizing protein (USP). See, e.g., WO 2022015969 A1, incorporated herein by reference.

[0225] As used herein, the term “vector” refers to a means of introducing a nucleic acid sequence into a cell, resulting in a transformed cell. Vectors include plasmids, transposons, phages, viruses, liposomes, lipid nanoparticles, and episomes. “Expression vectors” are nucleic acid sequences comprising the nucleotide sequence to be expressed in the recipient cell. Expression vectors contain a polynucleotide sequence as well as additional nucleic acid sequences to promote and/or facilitate the expression of the introduced sequence, such as start, stop, enhancer, promoter, and secretion sequences, into the genome of a mammalian cell. Examples of vectors include nucleic acid vectors, e.g., DNA vectors, such as plasmids, RNA vectors, viruses or other suitable replicons (e.g., viral vectors). A variety of vectors have been developed for the delivery of polynucleotides encoding exogenous proteins into a prokaryotic or eukaryotic cell. Examples of such expression vectors are disclosed in, e.g., WO 1994/11026; incorporated herein by reference. Certain vectors that can be used for the expression of antibodies and antibody fragments of some aspects and embodiments herein include plasmids that contain regulatory sequences, such as promoter and enhancer regions, which direct gene transcription. Other useful vectors for expression of antibodies and antibody fragments contain polynucleotide sequences that enhance the rate of translation of these genes or improve the stability or nuclear export of the mRNA that results from gene transcription. These sequence elements include, e.g., 5′ and 3′ untranslated regions, an internal ribosomal entry site (IRES), and polyadenylation signal site in order to direct efficient transcription of the gene carried on the expression vector. The expression vectors of some aspects and embodiments herein may also contain a polynucleotide encoding a marker for selection of cells that contain such a vector. Examples of a suitable marker include genes that encode resistance to antibiotics, such as ampicillin, chloramphenicol, kanamycin, or nourseothricin.

[0226] Ranges provided herein are understood to be shorthand for all of the values within the range. For example, a range of 1 to 50 is understood to include any number, combination of numbers, or sub-range from the group consisting 1, 2, 3, 4, 5, 6, 7, 8, 9, 10, 11, 12, 13, 14, 15, 16, 17, 18, 19, 20, 21, 22, 23, 24, 25, 26, 27, 28, 29, 30, 31, 32, 33, 34, 35, 36, 37, 38, 39, 40, 41, 42, 43, 44, 45, 46, 47, 48, 49, or 50.

[0227] The recitation of a listing of chemical groups in any definition of a variable herein includes definitions of that variable as any single group or combination of listed groups. The recitation of an embodiment for a variable or aspect herein includes that embodiment as any single embodiment or in combination with any other embodiments or portions thereof.

[0228] All terms are intended to be understood as they would be understood by a person skilled in the art. Unless defined otherwise, all technical and scientific terms used herein have the same meaning as commonly understood by one of ordinary skill in the art to which the disclosure pertains

[0229] In this application, the use of the singular includes the plural unless specifically stated otherwise. It must be noted that, as used in the specification, the singular forms “a,” “an” and “the” include plural referents unless the context clearly dictates otherwise. In this application, the use of “or” means “and/or” unless stated otherwise. Furthermore, use of the term “including” as well as other forms, such as “include”, “includes,” and “included,” is not limiting.

[0230] As used in this specification and claim(s), the words “comprising” (and any form of comprising, such as “comprise” and “comprises”), “having” (and any form of having, such as “have” and “has”), “including” (and any form of including, such as “includes” and “include”) or “containing” (and any form of containing, such as “contains” and “contain”) are inclusive or open-ended and do not exclude additional, unrecited elements or method steps. Any embodiments specified as “comprising” a particular component(s) or element(s) are also contemplated as “consisting of” or “consisting essentially of” the particular component(s) or element(s) in some embodiments. It is contemplated that any embodiment discussed in this specification can be implemented with respect to any method or composition of the present disclosure, and vice versa. Furthermore, compositions of the present disclosure can be used to achieve methods of the present disclosure.

[0231] The term “about” or “approximately” means within an acceptable error range for the particular value as determined by one of ordinary skill in the art, which will depend in part on how the value is measured or determined, i.e., the limitations of the measurement system.

[0232] Reference in the specification to “some embodiments,” “an embodiment,” “one embodiment” or “other embodiments” means that a particular feature, structure, or characteristic described in connection with the embodiments is included in at least some embodiments, but not necessarily all embodiments, of the present disclosures.

### BRIEF DESCRIPTION OF THE DRAWINGS

[0233] FIG. 1 is a schematic depicting the structure of the peptide loading complex (PLC), which includes beta-2 microglobulin (β2M), Transporter Associated with Antigen Processing I (TAP1), Transporter Associated with Antigen Processing II (TAP2), and Tapasin. The PLC participates in HLA class-I peptide loading and assembly. The PLC functions in selective translocation of class-I specific peptides across the cell membrane.

[0234] FIGS. 2A and 2B are histograms depicting surface HLA class-I expression of T cells that were edited using rBE4 and guide RNAs targeting TAP1 (FIG. 2A) and TAP2 (FIG. 2B), P2M positive control, or unedited control. Median fluorescence intensity (MFI) values are reported for HLA class-I expression, and percent (%) loss reflects reduction in MFI relative to unedited T cells.

[0235] FIGS. 3A and 3B are graphs depicting surface HLA class-I expression of T cells that were edited using rBE4 and guide RNAs to TAP1 (FIG. 3A) and TAP2 (FIG. 3B), P2M positive control, or unedited control.

[0236] FIGS. 4A and 4B depict editing of multiple inhibitory receptors for engineering NK-resistant K562 cells. FIG. 4A are graphs depicting the overexpression of CD47, PD-L1, HLA-G, or HLA-E compared to wild-type control in K562 cells. FIG. 4B are flow cytometry graphs depicting the overexpression of K.Quad of inhibitory receptors (i.e., CD47, PD-L1, HLA-G, and HLA-E) in K562 cells compared to wild-type control. Effector to Target (E:T) ratio indicates ratio of NK cells to K562 cells.

[0237] FIGS. 5A-5C depict evaluating persistence of allogeneic CAR-T cells using BLT (bone-marrow, thymus, liver) humanized NSG ((NOD/SCID/IL2γc^{-/-}) mice. FIG. 5A is a schematic depicting the use of T cells isolated from both a syngeneic BLT humanized mouse (iRFP670+ cells) and peripheral blood mononuclear cells (PBMCs) of an allogeneic de-identified human donor (GFP+) to be infused in a 1:1 ratio into recipient syngeneic BLT mice. FIG. 5B provides flow cytometry graphs depicting persistence of peripheral blood allogeneic cells (GFP+) to syngeneic cells (iRFP670+) at one (1), five (5), and fourteen (14) days post-infusion. FIG. 5C provides graphs depicting the ratio of individual CAR⁺ populations (allogeneic GFP+ cells and syngeneic iRFP670+ cells) of the total CAR+ population from three mice (#305, #308, or #309) out of the total CAR⁺ at one (1), five (5), fourteen (14), and twenty-one (21) days post-infusion.

[0238] FIGS. 6A and 6B depict the depletion of allogeneic CAR-T cells (GFP+) in multiple tissue types using BLT humanized mice. FIG. 6A are flow cytometry graphs depicting the frequency of syngeneic (iRFP670+) cells (top) and allogeneic (GFP+) cells (bottom) in bone marrow, lymph node, liver and spleen. FIG. 6B is a graph summarizing the frequency of CAR⁺ syngeneic (iRFP670+) cells and allogeneic (GFP+) cells out of the total CD3⁺ cells (%) in bone marrow, lymph node, liver and spleen.

[0239] FIG. 7 is a schematic depicting the infusion of allogeneic HLA⁺ and HLA⁻ (β2M knock-out) CAR-T cells at a 1:1 ratio into a recipient BLT mouse.

[0240] FIGS. 8A-8F depict recombinant human (rh) NK cell-mediated allorejection of HLA-CAR-T cells in BLT mice. FIG. 8A is a schematic of a timeline for infusing 2.5 μg of rhIL-15 via intraperitoneal injection (IP) and allogeneic HLA⁺ and HLA⁻ (P2M knock-out) CAR-T cells in BLT mice. FIG. 8B provides flow cytometry graphs depicting the presence of NK cells (via CD56 expression) in BLT mice one-week post-treatment with rhIL-15. Untreated mice were used as a control. FIG. 8C provides summary graphs depicting the expansion of NK cells in BLT mice at one and two-weeks post-treatment with rhIL-15 (top). Untreated mice were used as a control (bottom). FIG. 8D provides flow cytometry graphs depicting the frequency of degranulating human donor-derived and BLT mouse-derived rhIL-15 primed NK cells following stimulation with K562 cells (NK cells gated on: Live/Singlets/CD33⁻/CD3⁻/CD19⁻/mCD45⁻/hCD45⁺/CD56⁺). CD107a is a marker used to measure NK cell functional activity. Unstimulated NK cells cultured with media alone or pan-stimulated NK cells with PMA/Ionomycin were used as controls. FIG. 8E is a flow cytometry graph depicting the depletion of HLA- (P2M knock-out) CAR-T cells identified as CD2+HLA-A2-in BLT mice either treated with rhIL-15 or untreated. The graph shows that NK cells rejected the P2M knock-out T cells. FIG. 8F is a graph depicting the number of HLA- (P2M knock-out) CAR-T cells four (4) days post-infusion in BLT mice either treated with rhIL-15 or untreated.

[0241] FIG. 9 presents histograms demonstrating the knock-out of CD58 in cells using Cas9 (nuclease-active SpCas9), ABE8.20m, or rBE4 in combination with the indicated gRNAs (i.e., CD58.1, CD58.2, or CD58.3). “No EP” indicates a negative control where cells were not electroporated. “rBE4+TSBTx026” indicates a control in which cells were exposed to rBE4 in the presence of a negative-control gRNA sequence (TSBTx026). Surface expression of CD58 was measured using flow cytometry. The y-axis represents fluorescence intensity and the x-axis represents level of CD58 expression in the cells. In FIG. 9, “control gRNA” refers to a TRAC-specific guide RNA (target sequence: TTCGTATCTGTAAAACCAAG (SEQ ID NO: 671; PAM: AGG, and “No EP” refers to a negative control not subjected to base editing or electroporation (EP).

[0242] FIGS. 10A-10G provide bar graphs showing the frequency of on-target base editing (y-axis), expressed as a percentage (%), at the indicated target genes (indicated along y-axis) using the indicated gRNAs (x-axis) and base editors (ABE and CBE). The ABE base editor introduced an A to G alteration to a target gene and the CBE base editor introduced a C to T alteration to a target gene. The target genes were NLRC5 (CITA; FIG. 10A), TAPBP (Tapasin; FIG. 10B), PDIA3 (ERp57; FIG. 10C), CD155 (FIG. 10D), MICA (FIG. 10E), MICB (FIG. 10F), and CD48 (FIG. 10G). In FIGS. 10A-10G, CBE indicates rBE4 mRNA600, and ABE indicates ABE8.20. The guide RNAs identified along the x-axis of FIGS. 10A-10G are provided in Table 1A. The term “PDIA3 (ERp57)” represents “protein disulfide isomerase family A member 3,” the term “TAPBP” represents “TAP binding protein”, the term “NLRC5 (CITA)” represents “NLR family CARD domain containing 5 (class-I transcriptional activator),” the term “MICA” represents “MHC class I polypeptide-related sequence A,” the term “MICB“represents” MHC class I polypeptide-related sequence B,” the term “Nectin-2” represents “nectin cell adhesion molecule 2,” and the term “ULBP” represents “UL16 binding protein 1-6.”

[0243] FIG. 11 provides a schematic of a generic HLA single-chain trimer. In FIG. 11 “GS” represents a poly-Gly/Ser linker that intervenes individual elements of the single-chain trimer.

[0244] FIG. 12 provides flow cytometry plots (upper panel) and corresponding histograms (lower panel) demonstrating that the HLA-E single-chain trimers and dimers were secreted by anti-CD4 based-CAR-T cells. The term “UTD” indicates the untransduced control. From left to right, the plots and histograms correspond to the untransduced control (UTD) cells, construct BTx_CM193, construct BTx_CM211, construct BTx_CM212, and construct BTx_CM213. The polypeptide sequences for each construct is provided in Table 19. In the histograms (lower panel of FIG. 12), the x-axis corresponds to level of secretion of each HLA-E construct. The anti-CD4 based-CAR-T cells did not express a function β2M.

[0245] FIG. 13 provides a flow cytometry histogram demonstrating detection of a PE-labeled HLA-A2 tetramer using M-280 streptavidin beads conjugated to an anti-β2M antibody (αβ2M).

[0246] FIGS. 14A and 14B provide plots showing protection of β2M knock-out CAR-T cells secreting HLA-E single-chain trimers from NK cell-mediated killing. The plots indicate the degree of specific lysis (y-axis) of β2M knock-out T cells transduced with BTx_CM193 (FIG. 14A) and BTx_CM211 (FIG. 14B) relative to control untransduced (UTD) β2M knock-out T cells at the indicated effector-to-target (E:T) ratios (x-axis) 48 hours post-coculture.

[0247] FIGS. 15A-15C provide a schematic, histograms, and a plot showing that B2M knock-out overcame in vitro allogeneic T cell mediated killing. FIG. 15A provides a schematic showing the experimental setup for a mixed leukocyte reaction to evaluate the impact of B2M knock-out on T cell mediated killing. FIG. 15B provides a set of flow cytometry histograms showing that B2M knock-out protected cells from T cell mediated killing. FIG. 15C provides a plot showing that B2M knock-out protected cells from T cell modified killing. In FIGS. 15B and 15C “E:T” represents the ratio of effector to target cells, and AF647 represents “Invitrogen Alexa Fluor 647 dye fluorescence.”

[0248] FIGS. 16A-16D provide schematics, histograms, and a plot showing that B2M knock-out increased sensitivity to in vitro NK cell mediated killing. FIG. 16A provides a schematic showing the experimental setup for a mixed leukocyte reaction to evaluate the impact of B2M knock-out on NK cell mediated killing. FIG. 16B provides a set of flow cytometry histograms showing that B2M knock-out cells were susceptible to NK cell mediated killing. FIG. 16C provides a plot showing that B2M knock-out cells were susceptible to NK cell-mediated killing. In FIGS. 16B and 16C “E:T” represents the ratio of effector to target cells, and AF647 represents “Invitrogen Alexa Fluor 647 dye fluorescence.” FIG. 16D provides a schematic showing how knockout of B2M increases susceptibility of a modified T cell to killing by the NK cells of a recipient subject. In FIG. 16D, “KIRs” represents “killer Ig-like receptors,” NKG2A represents “CD94/NK group 2 member A,” and LIR-1 represents “leukocyte Ig-like receptor 1.” Without being bound by theory, it is believed that knock-out of B2M in a T cell leads to a deficiency in the T cell of HLA class-I surface expression, which removes a critical NK cell inhibitory signal via HLA class-I interaction with NK cell receptors such as KIRs, NKG2A, or LIR-1.

[0249] FIG. 17 provides a plot showing that BLT mice recapitulated key features of allorejection. The plot shows that, in the BLT mice, WT (“wild-type”) CAR-T cells (i.e., unedited cells without B2M knock-out) were killed during the period of the experiment and B2M knock-out CAR-T cells persisted. Therefore, B2M knock-out prevented host T cell allorejection. As a control experiment, it was determined that the wild type CAR-T cells persisted in mice devoid of endogenous T cells (see arrow in the figure). The y-axis represents the concentration of CAR-T cells in peripheral blood.

[0250] FIGS. 18A and 18B provide a schematic and a set of plots showing that HLA-E single chain trimer (SCT) conferred protection against in vitro NK cell mediated killing. FIG. 18A provides a schematic showing the experimental setup for a mixed leukocyte reaction to evaluate the impact of membrane-bound HLA-E single-chain trimer (SCT) expression in a T cell on NK cell mediated killing of the T cell. FIG. 18B provides plots showing that expression of the HLA-E SCT conferred protection against in vitro NK cell mediated killing. In FIG. 18B, the x-axis shows the ratio of effector to target cells (E:T).

[0251] FIG. 19 provides a schematic listing targets for a base editing strategy to overcome recipient NK cell rejection of B2M knock-out CAR-T cells. In FIG. 19 “BE” represents “base editing.

[0252] FIGS. 20A and 20B provide schematics showing domain architectures for membrane-anchored (“Anchored”) and soluble HLA-E single-chain trimers (SCTs), single-chain dimers (SCDs), and monomers suitable for expression in T cells to reduce allorejection by tuning HLA class-I expression independent of B2M knock-out. In FIG. 20A, the unlabeled, light-grey domain represents a loading peptide (LP) domain. In FIGS. 20A and 20B “LP” represents “loading peptide,” “ECD” represents “extracellular domain,” “TM” represents “transmembrane domain,” unlabeled white domains represent the extracellular domain of HLA-E, unlabeled light grey domains represent loading peptide domains, unlabeled medium-grey domains represent a G5 tail, “ΔTM” represents a change in position of the “transmembrane domain,” unlabeled dark grey domains represent a transmembrane domain, and a dotted box represents a deleted domain.

[0253] FIGS. 21A-21E provide histograms and plots showing that base editing of the indicated peptide loading genes (i.e., TAP1, Tapasin, TAP2, ERp57, and CITA) using the indicated editors (i.e., Cas12b or ABE) inhibited HLA class-I surface expression in T cells. In FIGS. 21A-21E the black curves represent HLA-ABC expression in edited cells and the shaded curves represent HLA-ABC expression in unedited cells. In FIGS. 21A-21E, the dots in the plot represent HLA expression relative to unedited cells (“UE”) resulting from base-editing using various gRNA's (x-axis). Guide RNA's used to edit the cells are listed in Table 1A.

[0254] FIG. 22 provides a schematic of an expression construct used to screen for sgRNA sequences suitable for base editing of the genome of a T cell using CBE to reduce expression of B2M/MHL I expression for allogeneic persistence. The genes targeted by the library included B2M, TAP1, TAP2, TAPBP, and/or TAPBPL. The library size was 2845, including 113 essential gene guides, and 120 non-targeting guides. Cells were transduced with the library constructs and sorted for B2M− T cells using flow cytometry to then identify which sgRNA sequences were enriched in the B2M− T cells. The promoter for the sgRNA sequence was U6 and the promoter for the CAR was EF1α. In FIG. 22, LTR represents a “long terminal repeat” sequence, T2A represents a self-cleaving peptide, CD4 eCD represents a co-stimulatory domain, 4-1BB represents a co-stimulatory domain that promotes T cell survival, and CD3ζ represent the domains of a chimeric antigen receptor, WPRE represents a Woodchuck Hepatitis Virus (WHP) Posttranscriptional Regulatory Element, “NGFR” represents an NGFR tag, and “BC” represents a barcode sequence for downstream sequencing analysis.

[0255] FIG. 23 provides a series of flow cytometry scatter plots showing the sorting of T cells transfected using libraries designed as described in FIG. 22. The genes whose expression is measured in each row of plots is indicated to the left of each row (i.e., NGFR, TCRa/b, and B2M). The arrows indicate B2M deficient (B2M-) cells that were sorted.

[0256] FIG. 24 provides scatter plots providing an overview of how T cells transfected using the libraries designed as described in FIG. 22 were sorted for B2M deficient cells to yield a sorted population. About 200M T cells were sorted and around 400 k cells were recovered in the sorted population.

[0257] FIG. 25 provides a plot showing enrichment for different guide sequences in the sorted population obtained according to the T cell sorting strategy described in FIG. 24. Enriched guides (see also Table 20) had higher values on the y-axis (i.e., sorted cell counts). The y-axis represents “sorted cell counts” and the x-axis represents “library input cell counts.” The dotted line represents 3 standard deviations multiplied by the mean value for all sorted cell counts.

[0258] FIG. 26 provides a plot showing a MAGeCK analysis to obtain p-values for guide RNA sequences enriched in the sorted population of T cells obtained using the sorting strategy described in FIG. 24. The guide b2m_825 (TSBTx845) was a previously-validated guide. Enriched guides included those targeting TAP1, TAP2, TAPBP (tapasin), and B2M. The Y-axis in FIG. 26 represents a logarithmic scale (−Log 10) and, to shorten the y-axis, there is a discontinuity in the scale between the values 3 and 10. Sequences for guide RNAs identified in FIG. 26 are provided in Table 1A.

[0259] FIG. 27 represents a multiple sequence alignment of human HLA genes. The dark regions in the alignments represent variable regions and the light-grey areas represent conserved regions. The arrows represent sites targeted by designed guide RNA's. Guide RNA's were designed to be compatible with ABE and/or CBE and to target the start site, a splice acceptor site, or a splice donor site. Guide RNA's were also designed to be compatible with Cas12b and to target exon conserved regions.

[0260] FIGS. 28A and 28B provide bar plots and a shaded chart showing the identification of gRNAs (indicated on the x-axis) that facilitated base editing resulting in a reduction in HLA class-I surface expression in T cells. In FIG. 28A, the rightmost bar in each graphs represents unedited cells and the y-axis in each graph represents frequency of surface protein expression for HLA-A or HLA-B, or percent HLA-C expression relative to unedited T cells. B2M knock-out reduced HLA-A, -B, and -C expression. The guide TSBTx4190 (g850) specifically knocked out HLA-A*02, which had a 1 nt mismatch from other HLA-A alleles (see dashed box on left). The TSBTx4200 (g860) guide specifically knocked out HLA-B. The TSBTx4193 (g853) and TSBTx4194 (g854) guides overlapped +1 nt targeting SD exon 4 (α3 domain). The guide RNAs are provided in Table 1A FIG. 28B provides the genotypes for three of the four donors whose cells were edited in the experiment. The guide RNAs targeting HLA class-I alleles were screened in activated T cells from 4 independent donors.

[0261] FIG. 29 presents a set of histograms showing the impact of base editing using guide RNAs TSBTx4190 (g850) and TSBTx4200 (g860) individually or together in combination with ABE8.20m on expression of HLA-A2, HLA-Bw6 (HLA-B), HLA-C, and pan HLA-E in edited primary T cells. The edited cells were from donor D270202 (see FIG. 28B). The guides TSBTx4190 and TSBTx4200 were designed to specifically disrupt HLA-A and HLA-B expression, respectively. As a control, a population of cells was also edited to knock-out expression of B2M.

[0262] FIGS. 30A and 30B provide a set of flow cytometry scatter plots and a plot showing that targeted HLA class-I knock-out using base editing mitigated T cell allorejection in a mixed lymphocyte reaction (MLR). Cells were labeled using carboxyfluorescein succinimidyl ester (CFSE) (measured on x-axis of FIG. 30A) or CellTrace™ Far Red (CTFR) (measured on y-axis of FIG. 30A). The labels to the left of the scatter plots of FIG. 30A represent the effector to target cell ratio (E:T) for the corresponding row of scatter plots. The impact on T cell allorejection was determined for CFSE-labeled on-target cells including HLA+(unedited), HLA-A knock-out (edited using guide RNA TSBTx4190), HLA-B knock-out (editing using guide RNA TSBTx4200), and HLA-A and HLA-B knock-out (“Dual KO”) cells relative to CTFR-labeled off-target B2M knock-out T cells by HLA class-I mismatched effector T cells. Data is shown 48 hours post-culture. In FIG. 30B “E:T” represents the ratio of effector to target cells.

[0263] FIGS. 31A and 31B provide a set of flow cytometry scatter plots and a plot showing that HLA-B knock-out resulted in protection against NK cell lysis. Cells were labeled using carboxyfluorescein succinimidyl ester (CFSE) (measured on x-axis of FIG. 31A) or CellTrace™ Far Red (CTFR) (measured on y-axis of FIG. 31A). The labels to the left of the scatter plots of FIG. 30A represent the effector to target cell ratio (E:T) for the corresponding row of scatter plots. The impact on NK cell lysis was determined for CTFR-labeled on-target cells including B2M knock-out (KO), HLA-A knock-out (edited using guide RNA TSBTx4190/g850), HLA-B knock-out (editing using guide RNA TSBTx4200/g860), and HLA-A and HLA-B knock-out (“Dual KO”) cells relative to CFSE-labeled off-target unedited cells (HLA+) T cells by NK cells. Data is shown 48 hours post-culture. In FIG. 31B “E:T” represents the ratio of effector to target cells.

[0264] FIG. 32 provides a plot showing that specific HLA-ABC knock-out prevented T cell-mediated allorejection in vivo. BLT mice were co-infused with an equal mixture of unedited (HLA+), B2M knock-out, and HLA-ABC knock-out T cells. All T cells were edited for TRAC and CIITA. HLA-ABC knock-out T cells were additionally multiplex edited with the following guide RNAs: TSBTx4190, which targets HLA-A, TSBTx4201, which targets HLA-B, and TSBTx4208, which targets HLA-C. The graph shows peripheral blood concentration of each T cell population.

[0265] FIGS. 33A-33D provide flow cytometry histograms and a plot showing that HLA deficient CAR-T cells evaded T cell-mediated allorejection in vitro. FIGS. 33A and 33B show HLA class-I expression (FIG. 33A). and HLA class-II (FIG. 33B) surface expression in T cells after base editing with rBE4 or ABE8.20m of the indicated genes. FIGS. 33C and 33D shows results from an in vitro T cell Mixed Leukocyte Reaction using target T cells (Mock Edit and B2M knock-out) co-cultured with HLA mismatched effector cells. The B2M KO cells, which were deficient in HLA-ABC expression (shaded curve in FIG. 33C and lower curve in FIG. 33D) evaded T cell killing. In FIGS. 33A-33D, the mock edited cells correspond to the dashed curves or lines.

[0266] FIG. 34 provides a schematic, and a set of flow cytometry scatter plots describing a humanized BLT mouse model used to evaluate allorejection evasion strategies in vivo. The schematic describes the generation of BLT mice. Steps for preparation of the BLT mice include 1) sub-lethal whole-body irradiation, 2) human fetal thymus and liver transplant, and 3) injection of fetal-liver CD34+ hematopoietic stem cells (HSCs). The flow cytometry scatter plots show the identification of human immune cells in peripheral blood 12 weeks post-tissue implantation.

[0267] FIGS. 35A-35C provide flow cytometry histograms, a schematic, and a flow cytometry scatter plot showing that HLA deficient CAR-T cells overcame in vivo T cell-mediated allorejection. FIG. 35A provides histograms confirming reduced polypeptide expression in TRAC knock-out (KO) or the Triple knock-out (TKO) TRAC, B2M, and CIITA allogeneic CAR-T cells relative to unedited cells. In FIG. 35A, the dashed curves represent the TRAC-KO CAR-T cells, the dark grey shaded curves represent the TKO CAR-T cells, and the light-grey shaded curve represents mock edited cells. In FIG. 35A, the numbers from top-to-bottom in each plot moving from left-to-right (i.e., TRAC, B2M, CIITA, respectively) represent the percent of cells measured to be deficient in expression of the indicated polypeptide in 1) mock edit cells, TRAC-KO cells, or TKO cells, 2) TRAC-KO cells or TKO cells, and 3) in TRAC-KO cells or TKO cells. FIG. 35B provides a schematic showing an experimental design where BLT mice were co-infused with a 1:1 ratio of TRAC-KO and TKO CAR-T cells. FIG. 35C provides scatter plots showing frequency of peripheral TRAC-KO CAR-T cells (black) and TKO CAR-T cells (gray) post-infusion.

[0268] FIG. 36 provides a schematic showing how base editing may be used to introduce a stop codon to a gene or to disrupt a splicing motif (e.g., a splice acceptor site, or a splice donor site).

[0269] FIG. 37 provides a plot showing results from a natural killer (NK) cell mixed leukocyte reaction demonstrating that T cells edited using pan HLA class-I sgRNAs (i.e., TSBTx4193 and TSBTx4194) were protected from NK cell lysis in vitro, whereas B2M knock-out cells were susceptible to lysis. Primary human NK cells were co-cultured with T cells base-edited using a base editor in combination with a guide targeting pan HLA class-I (i.e., RNA TSBTx4193 or TSBTx4194) or a guide targeting beta-2-microglobulin. The cells were co-cultured for 48 hours at the E:T ratios indicated on the x-axis of FIG. 37 prior to assessment of specific cell lysis. In FIG. 37 “E:T ratio” represents the ratio of effector cells (E), which were NK cells, to target cells (T), which were the base-edited T cells.

[0270] FIG. 38 provides a plot showing results from a natural killer (NK) cell mixed leukocyte reaction demonstrating that T cells edited using HLA class-I sgRNAs (i.e., TSBTx4193 and TSBTx4194) showed increased resistance to NK cell lysis relative to unedited HLA+ unedited T cells. Primary human NK cells were co-cultured with unedited HLA class-I mismatched (HLA+) T cells or with T cells base-edited using a base editor in combination with a guide targeting pan HLA class-I (i.e., RNA TSBTx4193 or TSBTx4194). The cells were co-cultured for 48 hours at the E:T ratios indicated on the x-axis of FIG. 37 prior to assessment of specific cell lysis. In FIG. 38 “E:T ratio” represents the ratio of effector cells (E), which were NK cells, to target cells (T), which were the base-edited or HLA+ T cells.

[0271] FIG. 39 provides a bar graph showing that was the dominant population of T cells resulting from base editing of the T cells using the guide RNA TSBTx4193 expressed only HLA-C. A population of allogeneic T cells was base edited using TSBTx4193 and then stained with antibodies against HLA-A2, HLA-Bw6, and HLA-C followed by flow cytometry. The bar graph of FIG. 39 shows the expression pattern of HLA class-I on the cells. In FIG. 39, HLA class-I expression percent is expressed relative to unedited cells.

[0272] FIG. 40 provides a plot showing that allogeneic T cells expressing HLA-ABC+ or HLA-C were protected from NK cell-mediated rejection in IL-15 primed BLT mice, whereas HLA-ABC negative or HLA class-I deficient T cells were not. A population of base-edited allogeneic T cells was infused into IL-15 primed BLT mice. The population of base-edited allogeneic T cells was prepared using a base editor and the guide RNA TSBTx4193. The plots of FIG. 40 show the number of allogeneic T cells with the immunophenotypes HLA-ABC+, HLA-C+, or HLA-ABC− per microliter of blood at 1 and 7 days post-infusion. Those base-edited cells deficient in expression of HLA-A and HLA-B and expressing HLA-C were protected from NK cell-mediated rejection in the IL-15 primed BLT mice, as were cells expressing HLA-ABC.

[0273] FIG. 41 provides a plot demonstrating that T cells expressing HLA-C+ and deficient in expression of HLA-A and HLA-B were resistant to in vivo T cell-mediated rejection in IL-15 primed BLT mice, whereas HLA-ABE+ allogeneic T cells were not. A population of allogeneic T cells was base edited using a base editor and the guide RNA TSBTx4193. The base-edited population of allogeneic T cells was then infused into IL-15 primed mice. The plot of FIG. 41 shows the number of allogeneic T cells with the immunophenotypes HLA-ABC+, HLA-C+, or HLA-ABC− per microliter of blood at 1, 7, and 14 days post-infusion. About 50% of allogeneic T cells expressing HLA-C+ were resistant to rejection.

[0274] FIGS. 42A-42C provide a schematic, heat maps, and a bar graph showing that base editing using some guide RNAs designed to target TAP2, TAP1, TAPBP, or B2M resulted in downregulation of B2M surface-expression but not HLA class I surface-expression. FIG. 42A provides a schematic showing the interaction between B2M, HLA class I (HLA-I) heavy chain polypeptides, and components of the peptide loading complex containing Tap2, Tap1, Tapasin, ERp57, and TAPBPL. FIG. 42B provides flow cytometry heatmaps showing that base editing using a base editor in combination with guide 65 (see guide b2m_629 listed in Table 1A) resulted in downregulation of B2M expression. The numbers in the squared-off regions of the heatmaps of FIG. 42B indicate the percent of cells counted that did not surface-express B2M.

[0275] FIG. 42B provides a bar graph showing that guides 47-68 resulted in downregulation of B2M surface-expression but had less or no effect on expression of HLA-A, -B, and —C surface-expression. In FIG. 52B, the B2M guide RNA corresponds to TSBTx845 (see Table 1A). In FIGS. 42B and 42C, guide 47 corresponds to Tap2_5, which targets TAP2; guide 48 corresponds to Tap1_93, which targets TAP1; guide 49 corresponds to Tap2_4, which targets TAP2; guide 50 corresponds to Tap1_139, which targets TAP1; guide 51 corresponds to Tapbp_18, which targets TAPBP; guide 52 corresponds to Tap2_137, which targets TAP2; guide 53 corresponds to Tapbp_64, which targets TAPBP; guide 54 corresponds to Tap1_161, which targets TAP1; guide 55 corresponds to Tap1_454, which targets TAP1; guide 56 corresponds to Tap1_485, which targets TAP1; guide 57 corresponds to Tapbp_5, which targets TAPBP; guide 58 corresponds to b2m_629, which targets B2M; guide 59 corresponds to b2m_630, which targets B2M; guide 60 corresponds to b2m_315, which targets B2M; and guide 61 corresponds to b2m_316, which targets B2M. The guide RNA sequences are provided in Table 1A. In FIGS. 42B and 42C, WT (“wild type”) cells were unedited T cells and the “Positive Control” or “B2M” cells were edited using the guide TSBTx845 known to be effective for use in knocking out B2M and HLA-A, -B, and -C expression.

[0276] FIGS. 43A-43C provide bar graphs and a collection of flow cytometry histograms showing that multiplex editing was effective in tuning HLA class I expression in T cells. T cells were base editing using guides 47-68 and the indicated combinations thereof, where guide 47 corresponds to Tap2_5, which targets TAP2; guide 48 corresponds to Tap1_93, which targets TAP1; guide 49 corresponds to Tap2_4, which targets TAP2; guide 50 corresponds to Tap1_139, which targets TAP1; guide 51 corresponds to Tapbp_18, which targets TAPBP; guide 52 corresponds to Tap2_137, which targets TAP2; guide 53 corresponds to Tapbp_64, which targets TAPBP; guide 54 corresponds to Tap1_161, which targets TAP1; guide 55 corresponds to Tap1_454, which targets TAP1; guide 56 corresponds to Tap1_485, which targets TAP1; guide 57 corresponds to Tapbp_5, which targets TAPBP; guide 58 corresponds to b2m_629, which targets B2M; guide 59 corresponds to b2m_630, which targets B2M; guide 60 corresponds to b2m_315, which targets B2M; and guide 61 corresponds to b2m_316, which targets B2M. The B2M guide RNA corresponds to TSBTx845 (see Table 1A). The WT (“wild type”) cells were unedited T cells. FIG. 43A provides flow cytometry histograms showing that HLA-A, -B, and —C surface-expression was tuned (i.e., shifted between levels observed for wild-type and B2M knock-out cells) through multiplex editing using guides 56 and 57, which targeted TAP1 and tapasin, respectively. FIGS. 43B and 43C provide bar graphs demonstrating that multiplex base editing using the indicated combinations of guides 47-68 resulted in tuning of HLA-A, -B, and —C surface-expression in base-edited T cells. The combination of guides 56 and 67, which targeted TAP1 and tapasin, respectively, resulted in the largest reduction in HLA-A, -B, and —C surface-expression in base-edited cells. FIGS. 43A-43C demonstrate that reducing HLA-A, -B, and -C expression can require base editing of multiple polypeptide components of the peptide loading complex (see FIG. 42A).

[0277] FIGS. 44A and 44B provide a chart and a multiple sequence alignment showing that base editing can be used to knock out expression of HLA-A and HLA-B in immune cells while maintaining expression of HLA-C. FIG. 44A provides a chart listing the percent of HLA-A, -B, and -C alleles analyzed that could be targeted for base editing using guides TSBTx4193 and TSBTx4194. Only 60% of the analyzed HLA-C alleles could be targeted for base editing using the guides, while over 98% of the HLA-A and HLA-B alleles can be targeted using the same guides. FIG. 44B provides a multiple sequence alignment showing that the HLA-C allele HLA-C*02:02:02:01 could be altered using a base editor system containing the guide TSBTx4193 or TSBTx4194, but that allele HLA-C*17:01:01:02 could not be effectively altered using the same guides on account of a mutation in the PAM region. The following sequences are provided in FIG. 44B in order of occurrence from top to bottom:

(SEQ ID NO: 2909)
CCCTCACCCTGAGATGGGGTAAGGAGG,
(SEQ ID NO: 2910)
CCTGCACCCTGAGATGGAGTAAGGAGG;
(SEQ ID NO: 2911)
CCCTCACCCTGAGCTGGGGTAAGGAGG.
In FIG. 44B, sgRNA_853
corresponds to TSBTx4193 (853)
(see Table 1A).

### DETAILED DESCRIPTION OF THE INVENTION

[0279] The present disclosure features genetically modified allogeneic immune cells (e.g., T- or NK-cells), and methods for producing and using these modified immune cells (e.g., T cells or NK cells).

[0280] The invention is based, at least in part, on the discovery that modified immune cell persistence is increased by using base editing technology and/or a nuclease to reduce or eliminate activity and/or surface expression of the following targets in modified immune cells:
[0281] 1) genes implicated in transcriptional activation of HLA class-I expression (NLRC5/CITA);
[0282] 2) conserved genomic sequences within the HLA-A, HLA-B, HLA-C loci;
[0283] 3) genes involved in proper assembly of mature HLA class-I molecules (e.g., TAP1, TAP2, PDIA3/ERp57, and TAPBP); and/or
[0284] 4) genes encoding proteins that bind NK cell activation receptors,
   including CD155, Nectin-2, CD48, MICA, and MICB; and/or other genes encoding proteins that function in or modulate an immune response, such as components of the peptide loading complex (PLC) (e.g., β2M, TAP1, TAP2, Tapasin) and/or CD58, or regulatory elements thereof, in an allogeneic immune cell (e.g., T- or NK-cell). The modification of immune cells to knock-out or knockdown specific genes is accomplished using a base editor system or nuclease as described herein.

[0285] The invention also provides modified immune cells over-expressing ligands of the inhibitory NK2GA receptor (e.g., HLA-E, HLA-G) expressed by Natural Killer (NK) cells. This over-expression provides for the increased persistence of the modified immune cells.

### HLA-G and HLA-E

[0286] HLA-G and HLA-E belong to the non-classical HLA-class Ib family. In contrast with classical HLA-Ia molecules (HLA-A, -B, and —C), HLA-E and G negatively regulate the immune response. This allows HLA-E and G expressing cells to avoid recognition and lysis by cytotoxic immune effector cells, such as NK cells. Seven different isoforms of HLA-G are encoded by the same primary mRNA through alternative splicing. Four isoforms (HLA-GT, -G2, -G3, and -G4) retain the transmembrane domain and therefore are membrane-bound, whereas the other three isoforms (HLA-G5, -G6, and -G7) retain intron-4 and lose the transmembrane domain, and are therefore released as soluble molecules. Modified immune cells (e.g., CAR-T cells) expressing soluble or membrane bound HLA-G or -E are expected to show increased persistence in a subject.

### Car-T Cell Therapies

[0287] Autologous, patient-derived chimeric antigen receptor-T cell (CAR-T) therapies have demonstrated remarkable efficacy in treating disease. While these products have led to significant clinical benefit for patients, the need to generate individualized therapies creates substantial manufacturing challenges and financial burdens. Allogeneic CAR-T therapies were developed as a potential solution to these challenges, having similar clinical efficacy profiles to autologous products while treating many patients with cells derived from a single healthy donor, thereby substantially reducing cost of goods and lot-to-lot variability. Allogeneic approaches are preferred over autologous cell preparation for a number of situations related to uncertainty of engineering autologous T cells to express a CAR and finally achieving the desired cellular products for a transplant at the time of medical emergency.

[0288] However, for allogeneic T cells, or “off-the-shelf” T cells, it is important to carefully negotiate the host's reactivity to the CAR-T cells (HVGD), as well as the allogeneic T cell's potential hostility towards a host cell (GVHD). Additionally, adoptively transferred allogeneic CAR-T cells exhibit poor persistence in vivo due to recipient/host immune-mediated rejection mechanisms. Host-derived alloreactive T cells recognize allogeneic CAR-T cells as “non-self” by binding to peptide complexed with foreign Human Leukocyte Antigen (HLA) on the surface of CAR-T cells. The presence of surface peptide/HLA class-I negatively regulates Natural Killer (NK) cells by engaging inhibitory Killer Ig-Like Receptors (KIRs). As such, the absence of surface HLA on cells leaves them susceptible to NK cell-mediated lysis. Thus, generating HLA-deficient allogeneic CAR-T cells that are below the threshold to activate host-derived alloreactive T cell-mediated rejection and above the threshold to inhibit host-derived NK cells will likely improve allogeneic therapies.

[0289] Base editors (BEs) are a class of emerging gene editing reagents that enable highly efficient, user-defined modification of target genomic DNA without the creation of double-stranded breaks (DSBs). In contrast to a nuclease-only editing strategy, concurrent modification of one or more genetic loci by base editing produces highly efficient gene knock-outs with no detectable translocation events. Multiplex editing of genes is likely to be useful in the creation of CAR-T cell therapies with improved therapeutic properties. The methods described herein address known limitations of allogeneic immune cell (e.g., CAR-T cell) products and are a promising development towards the next generation of precision cell-based therapies.

[0290] The present disclosure provides modified allogeneic immune cells (e.g., T- or NK-cell) that are less susceptible to NK cell-mediated lysis and are able to overcome host-derived alloreactive T cell-mediated rejection. In some embodiments, the modified allogeneic immune cell described herein is an allogeneic modified CAR-T cell. In some embodiments, the CAR-T cell is an allogeneic T cell that expresses a desired CAR, and can be universally applicable, irrespective of the donor and the recipient's immunogenic compatibility. An allogenic immune cell may be derived from one or more donors. In certain embodiments, the allogenic immune cell is derived from a single human donor. For example, the allogenic T cell may be derived from PBMCs of a single healthy human donor. In certain embodiments, the allogenic immune cell is derived from multiple human donors. In some embodiments, an allogeneic immune cell is generated, as described herein by using gene modification to introduce concurrent edits at one or more genetic loci. In embodiments, an allogeneic immune cell is derived from a stem cell (e.g., an induced pluripotent stem cell (iPSC)). In embodiments, the methods of the disclosure involve editing (e.g., base editing) a stem cell (e.g., an iPSC). A modification, or concurrent modifications as described herein may be a genetic editing, such as a base editing, generated by a base editor. The base editor may be a C base editor or A base editor. As is discussed herein, base editing may be used to achieve a gene disruption, such that the gene is not expressed. A modification by base editing may be used to achieve a reduction in gene expression. In some embodiments base editor may be used to introduce a genetic modification such that the edited gene does not generate a structurally or functionally viable protein product. In some embodiments, a modification, such as the concurrent modifications described herein may comprise a genetic editing, such as base editing, such that the expression or functionality of the gene product is altered in any way. For example, the expression of the gene product may be enhanced or upregulated as compared to baseline expression levels. In some embodiments the activity or functionality of the gene product may be upregulated as a result of the base editing, or multiple base editing events acting in concert. In some embodiments, a base editor and sgRNAs that provide for multiplex editing are introduced in a single electroporation event, thereby reducing electroporation event associated toxicity. Any known methods for incorporation of exogenous genetic material into a cell may be used to replace electroporation, and such methods known in the art are contemplated for use in any of the methods described herein.

[0291] The present disclosure provides an alternative means of producing allogeneic immune cells by using base editing technology and/or a nuclease to reduce or eliminate surface HLA class-I expression and/or expression of an NK cell surface activating ligand (e.g., CD58, CD115, CD48, MICA, MICB, Nectin-2, and/or ULBP). In embodiments, base editing technology and/or a nuclease is used to reduce or eliminate activity and/or surface expression of a β2M, TAP1, TAP2, TAPBP, PDIA3, NLRC5, HLA-A, HLA-B, and/or HLA-C polypeptide. In embodiments, base editing technology and/or a nuclease is used to reduce or eliminate surface expression of HLA-A and HLA-B while maintaining surface expression of HLA-C. In embodiments, base editing technology and/or a nuclease is used to knock-out expression of HLA-A and HLA-B (e.g., reduce expression to virtually undetectable levels) while maintaining surface expression of HLA-C. In embodiments, base editing technology and/or a nuclease is used to reduce or eliminate surface expression of HLA-A and HLA-B while maintaining surface expression of HLA-C and B2M. In embodiments, base editing technology and/or a nuclease is used to knock-out expression (e.g., reduce expression to virtually undetectable levels) of HLA-A and HLA-B while maintaining surface expression of HLA-C and B2M. In embodiments, base editing technology and/or a nuclease is used to reduce or eliminate surface expression of HLA-A and HLA-B while maintaining surface expression of B2M. In embodiments, base editing technology and/or a nuclease is used to knock-out expression of HLA-A and HLA-B (e.g., reduce expression to virtually undetectable levels) while maintaining surface expression of B2M. In embodiments, allogeneic immune cells produced according to methods of the present disclosure express B2M and have not been edited to knock-expression of B2M. In some embodiments, at least one or more genes encoding proteins that form the peptide loading complex (PLC) (e.g., β2M, TAP1, TAP2, Tapasin) (“PLC genes”), or regulatory elements of such genes, are modified in an allogeneic immune cell with the base editing compositions and methods provided herein. In some embodiments, the PLC genes comprise or consist of β2M, TAP1, TAP2, and Tapasin. In some embodiments, the PLC genes are TAP1 and/or TAP2.

[0292] In some embodiments, the PLC genes (e.g., β2M, TAP1, TAP2, Tapasin), or regulatory elements thereof, are modified in an allogeneic immune cell in combination with one or more modifications in at least one additional gene sequence or regulatory element thereof. In some embodiments, the additional gene sequence or regulatory element is selected from TCRα Chain (TRAC), Cluster of Differentiation 58 (CD58), and Class II, Major Histocompatibility Complex Transactivator (CIITA). In some embodiments, one or more of β2M, TAP1, TAP2, and/or Tapasin encoding genes are modified in an allogeneic immune cell in combination with one or more modifications in TRAC, CD58, and/or CIITA encoding genes.

[0293] In some embodiments, PLC genes (e.g., β2M, TAP1, TAP2, Tapasin), or regulatory elements thereof, are modified in an allogeneic immune cell in combination with the overexpression of one or more inhibitory receptors. In some embodiments, the inhibitory receptors are selected from Human Leukocyte Antigen-E (HLA-E), Human Leukocyte Antigen-G (HLA-G), Programmed Death Ligand 1 (PD-L1), Cluster of Differentiation 47 (CD47), and/or Cluster of Differentiation 58. In some embodiments, one or more of β2M, TAP1, TAP2, and/or Tapasin are modified in an allogeneic immune cell in combination with the overexpression of one or more of HLA-E, HLA-G, PD-L1, CD47, and/or CD58. In some embodiments, one or more of β2M, TAP1, TAP2, Tapasin, and/or CD58 are modified in an allogeneic immune cell in combination with the overexpression of HLA-E, HLA-G, PD-L1, and/or CD47.

[0294] In some embodiments, at least one or more PLC genes (e.g., β2M, TAP1, TAP2, Tapasin, and/or CD58), or regulatory elements thereof, are modified in an allogeneic immune cell in combination with one or more modifications in at least one additional gene sequence or regulatory element thereof and with the overexpression of one or more inhibitory receptors. In some embodiments, one or more of β2M, TAP1, TAP2, and/or Tapasin, are modified in an allogeneic immune cell in combination with modifications in TRAC, CD58, and/or CIITA and with the overexpression of one or more of HLA-E, HLA-G, PD-L1, and/or CD47. In some embodiments, one or more of β2M, TAP1, TAP2, and/or Tapasin are modified in an allogeneic immune cell in combination with one or modifications in TRAC, CD58, and CIITA and with the overexpression of HLA-E, HLA-G, PD-L1, and CD47.

[0295] The modified immune cells and methods provided herein address known limitations of CAR-T therapy and is a promising development towards the next generation of precision cell-based therapies.

### Dimeric and Trimeric HLA Constructs

[0296] The present disclosure provides human leukocyte antigen (HLA) constructs. The constructs comprise an HLA-E and/or HLA-G domain (e.g., those listed in Table 19 and/or described in Example 10), a signal peptide, and a loading peptide (see FIG. 11). In some embodiments, the HLA construct is membrane-bound or the HLA construct is secreted by a cell. Expression of one or more constructs in a modified immune cell allows for the immune cell to evade NK cells and avoid lysis by NK cells, optionally where the constructs bind to the NKG2A inhibitory receptor of natural killer (NK) cells. In embodiments, a modified immune cell expressing an HLA construct expresses β2M. In some instances, a modified immune cell expressing an HLA construct includes modifications described herein to reduce or eliminate expression of β2M.

[0297] The various domains of an HLA construct can be connected by linkers, such as those provided herein. The length of the linkers may be elongated or truncated by about or at least about 1, 2, 3, 4, 5, 6, 7, 8, 9, 10, 15, 20, 25, 30, 35, 40, 45, or 50 amino acids. In various instances, the linker is a Gly/Ser-linker (GS-linker). The length of the linkers may be about, at least about, or no more than about 1, 2, 3, 4, 5, 6, 7, 8, 9, 10, 15, 20, 25, 30, 35, 40, 45, 50, 75, or 100 amino acids.

[0298] In some instances, the HLA construct comprises an N-terminal signal peptide (e.g., an IL-2 signal peptide or a β2M signal peptide). Any signal peptide known in the art and suitable for secretion and/or membrane-localization of a polypeptide is suitable in the HLA constructs provided herein.

[0299] In some instances the HLA construct contains a transmembrane domain (e.g., any of those transmembrane domains provided herein), optionally at an N-terminal or C-terminal portion thereof. In some embodiments, an HLA construct containing a transmembrane domain further comprises a cytoplasmic portion, where the cytoplasmic portion in various instances is about, at least about, or no more than 1, 2, 3, 4, 5, 10, 15, 20, 25, 30, 35, 40, 45, 50, 75, or 100 amino acids in length. In embodiments, an HLA construct contains any one or more of the domains described in Table 19 and/or in Example 10, fragments thereof, or extensions thereof, where the fragment may correspond to an N-terminal and/or C-terminal truncation by about, at least about, and/or no more than about 1, 2, 3, 4, 5, 6, 7, 8, 9, 10, 15, 20, or 25 amino acids, and where the extension may correspond to an N-terminal and/or C-terminal extension by about, at least about, and/or no more than about 1, 2, 3, 4, 5, 6, 7, 8, 9, 10, 15, 20, or 25 amino acids.

[0300] In some embodiments, the HLA construct contains one of the following domain arrangements: Signal peptide-loading peptide-β2M domain-HLA-E/G domain; Signal peptide-β2M domain-loading peptide-HLA-E/G domain; or Signal peptide-loading peptide-HLA-E/G domain-β2M domain. In some cases, any one of these domain arrangements further includes a C-terminal transmembrane domain. In some instances, any one of these domain arrangements can be modified to not include any β2M domain. In some instances, the HLA-E/G domain contains an HLA-G5 intron tail (see Table 19), optionally where the HLA-G5 intron tail is disposed at a C-terminus or C-terminal portion of the HLA-E/G domain.

[0301] The transmembrane domain of the constructs provided herein traverse a cell's lipid bilayer cellular membrane. In some embodiments, this domain is derived from a receptor (e.g., an antigen receptor) having a transmembrane domain, while in other embodiments, this domain is synthetic. In some embodiments, the transmembrane domain may be derived from a non-human transmembrane domain and, in some embodiments, humanized. By “humanized” is meant having the sequence of the nucleic acid encoding the transmembrane domain optimized such that it is more reliably or efficiently expressed in a human subject. In some embodiments, the transmembrane domain is derived from another transmembrane protein expressed in a human immune effector cell. Examples of such proteins include, but are not limited to, subunits of the T cell receptor (TCR) complex, PDT, or any of the Cluster of Differentiation proteins, or other proteins, that are expressed in the immune effector cell and that have a transmembrane domain. In some embodiments, the transmembrane domain will be synthetic, and such sequences will comprise many hydrophobic residues.

[0302] Transmembrane domains for use in the disclosed HLA constructs can include at least the transmembrane region(s) of) the alpha, beta or zeta chain of the T-cell receptor, CD28, CD3 epsilon, CD45, CD4, CD5, CD8, CD9, CD16, CD22, CD33, CD37, CD64, CD80, CD86, CD134, CD137, CD154. In some embodiments, the transmembrane domain is derived from CD4, CD8α, CD28 and CD3ζ.

### Modified Immune Cells

[0303] The present disclosure provides immune cells (e.g., T- or NK-cells) modified using nucleobase editors and/or nucleases described herein. The modified immune cells may express chimeric antigen receptors (CARs) (e.g., CAR-T cells). In embodiments, the modified immune cells express an HLA-E and/or HLA-G single-chain dimer or trimer construct (e.g., those described above and/or listed in Table 19 and/or described in Example 10). Modification of immune cells to express a chimeric antigen receptor can enhance an immune cell's immunoreactive activity, wherein the chimeric antigen receptor has an affinity for an epitope on an antigen, wherein the antigen is associated with an altered fitness of an organism. For example, the chimeric antigen receptor can have an affinity for an epitope on a protein expressed in a diseased cell. Because the CAR-T cells can act independently of major histocompatibility complex (MHC), activated CAR-T cells can kill the diseased cell expressing the antigen. The direct action of the CAR-T cell evades defensive mechanisms that have evolved in response to MHC presentation of antigens to immune cells.

[0304] In embodiments, the modified immune cell has a reduced level of, lacks, or has virtually undetectable levels of one or more of the following polypeptides relative to an unmodified cell: B cell leukemia/lymphoma 11b (Bcl11b); B cell leukemia/lymphoma 2 related protein A1d (Bcl2a1d); B cell leukemia/lymphoma 6 (Bcl6); butyrophilin-like 6 (Btnl6); CD151 antigen (Cd151); chemokine (C—C motif) receptor 7 (Ccr7); discs large MAGUK scaffold protein 5 (Dlg5); erythropoietin (Epo); G protein-coupled receptor 18 (Gpr18); interferon alpha 15 (Ifnal5); interleukin 6 signal transducer (Il6st); interleukin 7 receptor (I17r); Janus kinase 3 (Jak3); membrane associated ring-CH-type finger 7 (Marchf7); NCK associated protein 1 like (Nckap11); phospholipase A2, group IIF (Pla2g2f); runt related transcription factor 3 (Runx3); Signal-regulatory protein beta 1B (Sirpb1b); transforming growth factor, beta 1 (Tgfb1); tumor necrosis factor (ligand) superfamily, member 14 (Tnfsf14); tumor necrosis factor (ligand) superfamily, member 18 (Tnfsf18); tumor necrosis factor (ligand) superfamily, member 8 (Tnfsf8); zinc finger CCCH type containing 8 (Zc3h8); (Rac family small GTPase 2); (Slc4a1); 5-azacytidine induced gene 2 (Azi2); a disintegrin and metalloprotease domain 17 (Adam 17); a disintegrin and metalloprotease domain 8 (Adam8); Acetyl-CoA Acetyltransferase 1 (ACAT1); ACLY; adapter related protein complex 3 beta 1 sububit (Ap3b1); adapter related protein complex 3 delta 1 sububit (Ap3d1); adenosine A2a receptor (Adora2a); adenosine deaminase (Ada); adenosine kinase (Adk); adenosine regulating molecule 1 (Adrm1); advanced glycosylation end product-specific receptor (Ager) allograft inflammatory factor 1 (Aif1); AKT1; AKT2; amyloid beta (A4) precursor protein-binding family B member 1 interacting protein (Apbblip); ankyrin repeat and LEM domain (Ankle1); annecin A1 (Anxal); arginase liver (Arg 1); arginase type II (Arg 2); AtPase Cu++ transporting, alpha polypeptide (Atp7a); autoimmune regulator (Aire); autophagy related 5 (Atg5); AXL; B and T Lymphocyte Associated (BTLA); B and T lymphocyte associated (Btla); B cell leukemia/lymphoma 10 (Bcl10); B cell leukemia/lymphoma 11a (Bcl11a); B cell leukemia/lymphoma 2 (Bcl2); B cell leukemia/lymphoma 3 (Bcl3); basic leucine zipper transcription factor, ATF-like (Batf); BCL2-associated X protein (Bax); BCL2L11; beta 2 microglobulin (B2m); BL2-associated agonist of cell dealth (Bad); BLIMP1; Bloom syndrome, RecQ like helicase (Blm); Bmi1 polycomb ring finger oncogene (Bmi1); Bone morphogenic protein 4 (Bmp4); Braf transforming gene (Braf); butyrophilin, subfamily 2, member A1 (Btn2a1); butyrophilin, subfamily 2, member A2 (Btn2a2); butyrophilin-like 1 (Btnl1); butyrophilin-like 2 (Btnl2); c-abl oncogene 1 (Abl1); c-abl oncogene 2 (Abl2); cadherin-like 26(Cdh26); calcium channel, voltage dependent, beta 4 subunit (Cacnb4); CAMK2D; capping protein regulator and myosin 1 linker 2 (Carmil2); carcinoembryonic antigen-related cell adhesion molecule (Ceacam1); Casitas B-lineage lymphoma b (Cblb); CASP8; Caspase 3 (Casp3); caspase recruitment domain family member 11 (Card11); catenin (cadherin associated protein), beta 1 (Ctnnb1); caveolin 1 (Cav1); CBL-B; CCAAT/enhancer binding protein (C/EBP), beta (Cebpb); CCR10; CCR4; CCR5; CCR6; CCR9; CD103; CD11a; CD122; CD123; CD127; CD130; CD132; CD160 antigen (Cd160); CD161; CD19; CD1d1 antigen (Cd1d1); CD1d2 antigen (CD1d2); CD2 antigen (CD2); CD209e antigen (Cd209e); CD23; CD244 molecule A (Cd244a); CD24a antigen (Cd24a); CD27 antigen (CD27); CD274 antigen (Cd274); CD276 antigen (Cd276); CD28 antigen (Cd28); CD3 delta; CD3 epsilon; CD3 gamma; CD30; CD300A molecule (Cd300a); CD33; CD38; CD4 antigen (Cd4); CD40 ligand (Cd40lg); CD44 antigen (Cd44); CD46 antigen, complement regulatory protein (Cd46); CD47 antigen (Rh-related antigen, integrin-associated signal transducer) (Cd47); CD48 antigen (Cd48); CD5 antigen (Cd5); CD52; CD58; CD59b antigen (Cd59b); CD6 antigen (Cd6); CD69; CD7; CD70; CD74 antigen (Cd74); CD8; CD8 antigen (Cd8); CD80 antigen (Cd80); CD81 antigen (Cd81); CD82; CD83 antigen (Cd83); CD86; CD86 antigen (Cd86); CD8A; CD96; CD99; CDK4; CDK8; CDKN1B; chemokine (C motif) ligand 1 (Xcl1); chemokine (C—C motif) ligand 19 (Ccl19); chemokine (C—C motif) ligand 2 (Ccl2); chemokine (C—C motif) ligand 20 (Ccl20); chemokine (C—C motif) ligand 5 (Ccl5); chemokine (C—C motif) receptor 2 (Ccr2); chemokine (C—C motif) receptor 6 (Ccr6); chemokine (C—C motif) receptor 9 (Ccr9); chemokine (C—X—C motif) ligand 12 (Cxcl12); chemokine (C—X—C motif) receptor (Cxcr4); Chitinase 3 Like 1 (Chi311); cholinergic receptor, nicotinic, alpha polypeptide 7 (Chrna7); chromodomain helicase DNA binding protein 7 (Chd7); CLA; Class II Major Histocompatibility Complex Transactivator (CIITA); cleft lip and palate associated transmembrane protein 1 (Clptm1); Cluster of Differentiation 123 (CD123); Cluster of Differentiation 3 (CD3); Cluster of Differentiation 33 (CD33); Cluster of Differentiation 52 (CD52); Cluster of Differentiation 7 (CD7); Cluster of Differentiation 96 (CD96); coagulation factor II (thrombin) receptor-like 1 (F2rl1); coil-coil domain containing 88B (Ccdc88b); core-binding factor beta (Cbfb); coronin, actin binding protein 1A (Coro1a); coxsackie virus and adenovirus receptor (Cxadr); CS-1; CSF2CSK; c-src tyrosine kinase (Csk); C-type lectin domain family 2, member i (Clec2i); C-type lectin domain family 4, member a2 (Clec4a2); C-type lectin domain family 4, member d (Clec4d); C-type lectin domain family 4, member e (Clec4e); C-type lectin domain family 4, member f (Clec4f); C-type lectin domain family 4, member g (Clec4g); CUL3; CXCR3; cyclic GMP-AMP synthase (Cgas); cyclin D3 (Ccnd3); cyclin dependent kinase inhibitor 2A (Cdkn2a); cyclin-dependent kinase (Cdk6); CYLD lysine 63 deubiquitinase (Cyld); cysteine-rich protein 3 (Crip3); cytidine 5′-triphosphate synthase (Ctps); Cytochrome P450 Family 11 Subfamily A Member 1 (Cyp11a1); cytochrome P450, family 26, subfamily b, polypeptide (Cyp26b1); Cytokine Inducible SH2 Containing Protein (CISH); cytotoxic T lymphocyte-associated protein 2 alpha (Ctla2a); Cytotoxic T-Lymphocyte Associated Protein 4 (CTLA-4); DCK; dedicator of cytokinesis 2 (Dock2); dedicator of cytokinesis 8 (Dock8); delta like canonical Notch ligand 4 (D114); deltex 1, E3 ubiquitin ligase (Dtx1); deoxyhypusine synthase (Dhps); DGKA; DGKZ; DHX37; dicer 1, ribonuclease type III (Dicer1); dipeptidylpeptidase 4 (Dpp4); discs large MAGUK scaffold protein 1 (Dlg1); DnaJ heat shock protein family (Hsp40) member A3 (Dnaja3); dolichyl-di-phosphooligosaccharide-protein glycotransferase (Ddost); double homeobox B-like 1 (Duxbl1); drosha, ribonuclease type III (Drosha); dual specificity phosphatase 10 (Dusp10); dual specificity phosphatase 22 (Dusp22); dual specificity phosphatase 3 (Dusp3); E74-like factor 4 (Elf4); early growth response 1 (Egr1); early growth response 3 (Egr3); ELOB (TCEB2); ENTPD1 (CD39); eomesodermin (Eomes); Eph receptor B4 (Ephb4); Eph receptor B6 (Ephb6); ephrin B1 (Efnbl); ephrin B2 (Efnb2); ephrin B3 (Efnb3); Epstein-Barr virus induced gene 3 (Ebi3); erb-b2 receptor tyrosine kinase (Erbb2); eukaryotic translation initiation factor 2 alpha kinase 4 (Eif2ak4); FADD; family with sequence similarity 49, member B (Fam49b); Fanconi anemia, complementation group A (Fanca); Fanconi anemia, complementation group D2 (Fancd2); Fas (TNF receptor superfamily member 6) (Fas); Fas (TNFRSF6)-associated via death domain (Fadd); Fas Cell Surface Death Receptor (FAS); Fc receptor, IgE, high affinity I, gamma polypeptide (Fcer1g); fibrinogen-like protein 1 (Fgl1); fibrinogen-like protein 2 (Fgl2); FK506 binding protein 1a (Fkbp1a); FK506 binding protein 1b ((Fkbp1b); flotillin 2 (Flot2); FMS-like tyrosine kinase (Flt3); forkhead box J1 (Foxj1); forkhead box N1 (Foxn1); forkhead box P1 (Foxp1); forkhead box P3 (Foxp3); frizzled class receptor 5 (Fzd5); frizzled class receptor 7 (Fzd7); frizzled class receptor 8 (Fzd8); fucosyltransferase 7 (Fut7); Fyn proto-oncogene (Fyn); gap junction protein, alpha 1 (Gja1); GATA binding protein 3 (GATA3); GCN2 kinase (IDO pathway); gelsolin (Gsn); GLI-Kruppel family member GLI3 (Gli3); glycerol-3-phosphate acyltransferase, mitochondrial (Gpam); growth arrest and DNA-damage-inducible 45 gamma (Gadd45g); GTPase, IMAP family member 1 (Gimap1); H1TET2; H2.0-like homeobox (Hlx); haematopoietic T (hem1); HCLS1 binding protein 3 (Hs1bp3); heat shock 105 kDa/110 kDa protein 1 (Hsph1); heat shock protein 1 (chaperonin) (Hspd1); heat shock protein 90, alpha (cytosolic), class A member 1 (Hsp90aa1); hematopoietic SH2 domain containing (Hsh2d); hepatitis A virus cellular receptor 2 (Havcr2); hes family bHLH transcription factor 1 (Hes1); histocompatibility 2, class II antigen A, alpha (H2-Aa); histocompatibility 2, class II antigen A, beta 1 (H2-Abl); histocompatibility 2, class II, locus DMa (H2-DMa); histocompatibility 2, M region locus 3 (H3-M3); histocompatibility 2, O region alpha locus (H2-Oa); histocompatibility 2, T region locus 23 (H2-T23); HLA-DR; homeostatic iron regulator (Hfe); icos ligand (Icosl); IKAROS family zinc finger 1 (Ikzf1); IL10; IL10RA; IL2 inducible T cell kinase (Itk); IL6R; Indian hedgehog (Ihh); indoleamine 2,3-dioxygenase 1 (Idol); inducible T cell co-stimulator (Icos); inositol 1,4,5-trisphosphate 3-kinase B (Itpkb); insulin II (Ins2); insulin-like growth factor 1 (Igf1); insulin-like growth factor 2 (Igf2); insulin-like growth factor binding protein 2 (Igfbp2); integrin alpha L (Itgal); integrin alpha M (Itgam); integrin alpha V (Itgav); integrin alpha X (Itgax); integrin beta 2 (Itgb2); integrin, alpha D (Itgad); intercellular adhesion molecule 1 (Icam1); interferon (alpha and beta) receptor 1 (Ifnar1); interferon alpha 1 (Ifna1); interferon alpha 11 (Ifnal1); interferon alpha 12 (Ifnal2); interferon alpha 13 (Ifnal3); interferon alpha 14 (Ifna14); interferon alpha 16 (Ifnal6); interferon alpha 2 (Ifna2); interferon alpha 4 (Ifna4); interferon alpha 5 (Ifna5); interferon alpha 6 (Ifna6); interferon alpha 7 (Ifna7); interferon alpha 9 (Ifna9); interferon alpha B (Ifnab); interferon beta 1 (Ifnb1); interferon gamma (Ifng); interferon kappa (Ifnk); interferon regulatory factor 1 (Irf1); interferon regulatory factor 4 (Irf4); interferon zeta (Ifnz); interleukin 1 beta (Il1b; interleukin 1 family, member 8 (Illf8); interleukin 1 receptor-like 2 (Il1r12); interleukin 12 receptor, beta1 (Il12rb1); interleukin 12a (Il12a); interleukin 12b (Il12b); interleukin 15 (I115); interleukin 18 (Il18); interleukin 18 receptor 1 (Il18r1); interleukin 2 (I12); interleukin 2 receptor, alpha chain (Il2ra); interleukin 2 receptor, gamma chain (Il2rg); interleukin 20 receptor beta (Il20rb); interleukin 21 (Il21); interleukin 23, alpha subunit p19 (I123a); interleukin 27 (I127); interleukin 4 (I14); interleukin 4 receptor, alpha (Il4ra); interleukin 6 (I16); interleukin 7 (I17); IRF8; itchy, E3 ubiquitin protein ligase (Itch); jagged 2 (Jag2); jumonji domain containing 6 (Jmjd6); JUNB; junction adhesion molecule like 9 (Jam9); K(lysine) acetyltransferase 2A (Kat2a); KDEL (Lys-Asp-Glu-Leu) endoplasmic reticulum protein retention receptor 1 (Kdelr1); KIT proto-oncogene receptor tyrosine kinase (Kit); LAG-3; LAIR-1 (CD305); LDHA; lectin, galactose binding, soluble 1 (Lgals1); lectin, galactose binding, soluble 3 (Lgals3); lectin, galactose binding, soluble 8 (Lgals8); lectin, galactose binding, soluble 9 (Lgals9); leptin (Lep); leptin receptor (Lepr); leucine rich repeat containing 32 (Lrrc32); leukocyte immunoglobulin-like receptor, subfamily B, member 4A (Lilrb4a); LFNG O-fucosylpeptide 3-beta-N-acetylglucosaminyltransferase (Lfng); LIF; ligase IV, DNA, ATP-dependent (Lig4); LIM domain only 1 (Lmo1); limb region 1 like (Lmbrl); linker for activation of T cells (Lat); lymphocyte antigen 9 (Ly9); lymphocyte cytosolic protein 1 (Lcp1); lymphocyte protein tyrosine kinase (Lck); lymphocyte transmembrane adaptor 1 (Lax1); lymphocyte-activation gene 3 (Lag3); lymphoid enhancer binding factor 1 (Lef1); LYN; lysyl oxidase-like 3 (Loxl3); MAD1 mitotic arrest deficient 1-like 1 (Mad1l1); MALT1 paracaspase (Malt1); MAP4K4; MAPK14; MCJ; mechanistic target of rapamycin kinase (Mtor); MEF2D; Methylation-Controlled J Protein (MCJ); methyltransferase like 3 (Mettl3); MGAT5; MHC I like leukocyte 2 (Mill2); midkine (Mdk); mitogen-activated protein kinase 8 interacting protein 1 (Mapk8ip10); moesin (Msn); myelin protein zero-like 2 (Mpzl2); myeloblastosis oncogene (Myb); myosin, heavy polypeptide 9, non-muscle (Myh9); Nedd4 family interacting protein 1 (Ndfip1); neural precursor cell expressed, developmentally down-regulated 4 (Nedd4); NFATc1; NFATC2; NFATC4; NFKB activating protein (Nkap); nicastrin (Ncstn); NK2 homeobox 3 (Nkx2-3); NLR family, CARD domain containing 3 (Nlrc3); NLR family, pyrin domain containing 3 (Nlrp3); non-catalytic region of tyrosine kinase adaptor protein 1 (Nck1); non-catalytic region of tyrosine kinase adaptor protein 2 (Nck2); non-homologous end joining factor 1 (Nhej1); non-SMC condensin II complex, subunit H2 (Ncaph2); Notch-regulated ankyrin repeat protein (Nrarp); NT5E (CD73); nuclear factor of activated T cells, cytoplasmic, calcineurin dependent (Nfatc3); nuclear factor of kappa light polypeptide gene enhancer in B cells inhibitor, delta (Nfkbid); nuclear receptor co-repressor 1 (Ncor1); Nuclear Receptor Subfamily 4 Group A Member 1 (NR4A1); Nuclear Receptor Subfamily 4 Group A Member 2 (NR4A2); Nuclear Receptor Subfamily 4 Group A Member 3 (NR4A3); ODC1; OTU domain containing 5 (Otud5); OTULINL (FAM105A); paired box 1 (Pax1); PDCD1 (PD1; PD-1); PDIA3; pellino 1 (Peli1); peroxiredoxin 2 (Prdx2); PHD1 (EGLN2); PHD2 (EGLN1); PHD3 (EGLN3); phosphodiesterase 5A, cGMP-specific (Pde5a); phosphoinositide-3-kinase regulatory subunit (Pik3r6); phospholipase A2, group IIA (Pla2g2a); phospholipase A2, group IID (Pla2g2d); phospholipase A2, group IIE (Pla2g2e); phosphoprotein associated with glycosphingolipid microdomains 1 (Pag1); PIK3CD; PIKFYVE; POZ (BTB) and AT hook containing zinc finger 1 (Patz1); PPARa; PPARd; PR domain containing 1, with ZNF domain (Prdm1); presenilin 1 (Psen1); presenilin 2 (Psen2); PRKACA; PRKC, apoptosis, WT1, regulator (Pawr); programmed cell death 1 ligand 2 (Pdcd1lg2); prosaposin (Psap); prostaglandin E receptor 4 (subtype EP4) (Ptger4); protein kinase C, theta 2 (Prkcq); protein kinase C, zeta (Prkcz); protein kinase, cAMP dependent regulatory, type I, alpha (Prkar1a); protein kinase, DNA activated, catalytic polypeptide (Prkdc); protein phosphatase 3, catalytic subunit, beta isoform (Ppp3cb); protein tyrosine phosphatase, non-receptor type 2 (Ptpn2); protein tyrosine phosphatase, non-receptor type 22 (lymphoid) (Ptpn22); protein tyrosine phosphatase, non-receptor type 6 (Ptpn6); protein tyrosine phosphatase, receptor type, C (Ptprc); PTEN; PTPN11; purine-nucleoside phosphorylase (Pnp); purinergic receptor P2X, ligand-gated ion channel, 7 (P2rx7); PVR Related Immunoglobulin Domain Containing (PVRIG; CD112R); PYD and CARD domain containing 7 (Pycard); RAB27A, member RAS oncogene family (Rab27a); RAB29, member RAS oncogene family (Rab29); radical S-adenosyl methionine domain containing 2 (Rsad2); RAR-related orphan receptor alpha (Rora); RAR-related orphan receptor gamma (Ror); RAS guanyl releasing protein 1 (Rasgrpl); ras homolog family member A (Rhoa); ras homolog family member H (Rhoh); RAS protein activator like 3 (Rasal3); RASA2; receptor (TNFRSF)-interacting serine-threonine kinase 2 (Ripk2); recombination activating gene 1 (Rag1); recombination activating gene 2 (Rag2); Regulatory Factor X Associated Ankyrin Containing Protein (RFXANK); RHO family interacting cell polarization regulator 2 (Ripor2); ribosomal protein L22 (Rpl 22); ribosomal protein S6 (Rps6); RING CCCH (C3H) domains 1 (Rc3h1); ring finger and CCCH-type zinc finger domains 2 (Rc3h2); RNF2; runt related transcription factor 1 (Runx1); runt related transcription factor 2 (Runx2); SAM and SH3 domain containing 3 (Sash3); schlafen 1; Selectin P Ligand/P-Selectin Glycoprotein Ligand-1 (SELPG/PSGL1) polypeptide; selenoprotein K (Selenok); sema domain immunoglobulin domain (Ig), transmembrane domain (TM) and short cytoplasmic domain, (semaphorin) 4A (Sema4a); serine/threonine kinase 11 (Stk11); SH3 domain containing ring finger 1 (Sh3rf1); SHP1; sialophorin (Spn); SIGLEC15; signal transducer and activator of transcription 3 (Stat3); signal transducer and activator of transcription 5A (Stat5A); signal transducer and activator of transcription 5B (Stat5B); signal-regulatory protein alpha (Sirpa); Signal-regulatory protein beta 1A (Sirpb1a); Signal-regulatory protein beta 1C (Sirpb1c); SLA; SLAM family member 6 (Slamf6); SLAMF7; SMAD family member 3 (Smad3); SMAD family member 7 (Smad7); SMARCA4; solute carrier family 11 (proton-coupled divalent metal ion transporters), member 1 (Slc11 al); solute carrier family 4 (anion exchanger), member 1; solute carrier family 46, member 2 (Slc46a2); sonic hedgehog (Shh); SOS Ras/Rac guanine nucleotide exchange factor 1 (Sos1); SOS Ras/Rac guanine nucleotide exchange factor 2 (Sos2); special AT-rich sequence binding protein 1 (Satb1); spleen tyrosine kinase (Syk); Sprouty RTK Signaling Antagonist 1 (Spry1); Sprouty RTK Signaling Antagonist 2 (Spry2); squamous cell carcinoma antigen recognized by T cells (Sart1); src homology 2 domain-containing transforming protein B (Shb); Src-like-adaptor 2 (Sla2); SRY (sex determining region Y)-box 4 (Sox4); STK4; suppression inducing transmembrane adaptor 1 (Sit1); suppressor of cytokine signaling 1 (Socs1); suppressor of cytokine signaling 5 (Socs5); suppressor of cytokine signaling 6 (Socs6); surfactant associated protein D (Sftpd); SUV39; syndecan 4 (Sdc4); syntaxin 11 (Stx11); T Cell Immunoglobulin Mucin 3 (Tim-3); T cell immunoreceptor with Ig and ITIM domains (Tigit); T cell receptor alpha joining 18 (Traj18); T Cell Receptor Beta Constant 1 (TRBC1); T Cell Receptor Beta Constant 2 (TRBC2); T cell, immune regulator 1, ATPase, H+ transporting, lysosomal V0 protein A3 (Tcirg1); T cell-interacting, activating receptor on myeloid cells 1 (Tarm1); T-box 21 (Tbx21); TCR; TCR alpha; TCR beta; TCR complex gene sequence; Tet Methylcytosine Dioxygenase 2 (TET2); TGFbRII; TGFbRII (TGFBR2); three prime repair exonuclease 1 (Trex1); thymocyte selection associated (Themis); thymus cell antigen 1, theta (Thy 1); TMEM222; TNF receptor-associated factor 6 (Traf6); TNFAIP3; TNFRSF10B; TNFRSF8 (CD30); TOX; TOX2; TRAC; transformation related protein 53 (Trp53); Transforming Growth Factor Beta Receptor II (TGFbRII); transforming growth factor, beta receptor II (Tgfbr2); transmembrane 131 like (Tmeml311); transmembrane protein 98 (Tmem98); triggering receptor expressed on myeloid cells-like 2 (Treml2); TSC complex subunit 1 (Tsc1); tumor necrosis factor (ligand) superfamily, member 11 (Tnfsf11); tumor necrosis factor (ligand) superfamily, member 13b (Tnfsf13b); tumor necrosis factor (ligand) superfamily, member 4 (Tnfsf4); tumor necrosis factor (ligand) superfamily, member 9 (Tnfsf9); tumor necrosis factor receptor superfamily, member 13c (Tnfrsf13c); tumor necrosis factor receptor superfamily, member 4 (Tnfrsf4); tumor necrosis factor, alpha-induced protein 8-like 2 (Tnfalp812); twisted gastrulation BMP signaling modulator 1 (Twsg1); UBASH3A; vanin 1 (Vnn1); vascular cell adhesion molecule 1 (Vcam1); VHL; v-maf musculoaponeurotic fibrosarcoma oncogene family, protein B (avian) (Mafb); V-set and immunoglobulin domain containing 4 (Vsig4); V-Set Immunoregulatory Receptor (VISTA); WD repeat and FYVE domain containing 4 (Wdfy4); wingless-type MMTV integration site family, member 1 (Wnt1); wingless-type MMTV integration site family, member 4 (Wnt4); WNT signaling pathway regulator (Apc); WW domain containing E3 ubiquitin protein ligase 1 (Wwp1); XBP1; YAP1; ZAP70; ZC3H12A; zfp35; zinc finger and BTB domain containing 1 (Zbtb1); zinc finger and BTB domain containing 7B (Zbtb7B); zinc finger CCCH type containing 12A (Zc3h12a); zinc finger CCCH type containing 12D (Zc3h12d); zinc finger E-box binding homeobox 1 (Zeb1); zinc finger protein 36, C3H type (Zfp36); zinc finger protein 36, C3H type-like 1 (Zfp36L1); zinc finger protein 36, C3H type-like 2 (Zfp36L2); and zinc finger protein 683 (Zfp683).

[0305] Some embodiments comprise allogeneic immune cell immunotherapy. In allogeneic immune cell immunotherapy, immune cells are obtained from a donor other than the subject who will be receiving treatment. In some embodiments, immune cells are obtained from a healthy subject or donor and are genetically modified to express a chimeric antigen receptor and are effectively redirected against specific antigens. The immune cells, after modification to express a chimeric antigen receptor (CAR), are administered to a subject for treating a disease. In some embodiments, immune cells to be modified to express a chimeric antigen receptor (CAR) can be obtained from pre-existing stock cultures of immune cells.

[0306] Immune cells and/or immune effector cells can be isolated or purified from a sample collected from a subject or a donor using standard techniques known in the art. For example, immune effector cells can be isolated or purified from a whole blood sample by lysing red blood cells and removing peripheral mononuclear blood cells by centrifugation. The immune effector cells can be further isolated or purified using a selective purification method that isolates the immune effector cells based on cell-specific markers such as CD25, CD3, CD4, CD8, CD28, CD45RA, or CD45RO. In one embodiment, CD4⁺ is used as a marker to select T cells. In one embodiment, CD8⁺ is used as a marker to select T cells. In one embodiment, CD4⁺ and CD8⁺ are used as a marker to select regulatory T cells.

[0307] In another embodiment, the present disclosure provides T cells that have targeted gene knock-outs at the TCR constant region (TRAC), which is responsible for TCRαβ surface expression. TCRαβ-deficient CAR-T cells are compatible with allogeneic immunotherapy (Qasim et al., Sci. Transl. Med. 9, eaaj2013 (2017); Valton et al., Mol Ther. 2015 September; 23(9): 1507-1518). If desired, residual TCRαβ T cells are removed using CliniMACS magnetic bead depletion to minimize the risk of GVHD. In another embodiment, the present disclosure provides donor T cells selected ex vivo to recognize minor histocompatibility antigens expressed on recipient hematopoietic cells, thereby minimizing the risk of graft-versus-host disease (GVHD), which is the main cause of morbidity and mortality after transplantation (Warren et al., Blood 2010; 115(19):3869-3878).

[0308] Another technique for isolating or purifying immune effector cells is flow cytometry. In fluorescence activated cell sorting a fluorescently labelled antibody with affinity for an immune effector cell marker is used to label immune effector cells in a sample. A gating strategy appropriate for the cells expressing the marker is used to segregate the cells. For example, T lymphocytes can be separated from other cells in a sample by using, for example, a fluorescently labeled antibody specific for an immune effector cell marker (e.g., CD4, CD8, CD28, CD45) and corresponding gating strategy. In one embodiment, a CD4 gating strategy is employed. In one embodiment, a CD8 gating strategy is employed. In one embodiment, a CD4 and CD8 gating strategy is employed. In some embodiments, a gating strategy for other markers specific to an immune effector cell is employed instead of, or in combination with, the CD4 and/or CD8 gating strategy.

[0309] The immune effector cells contemplated in the present disclosure are effector T cells. In some embodiments, the effector T cell is a naïve CD8⁺ T cell, a cytotoxic T cell, a natural killer T (NKT) cell, a natural killer (NK) cell, or a regulatory T (Treg) cell. In some embodiments, the effector T cells are thymocytes, immature T lymphocytes, mature T lymphocytes, resting T lymphocytes, or activated T lymphocytes. In some embodiments the immune effector cell is a CD4⁺ CD8⁺ T cell or a CD4⁻ CD8⁻ T cell. In some embodiments the immune effector cell is a T helper cell. In some embodiments the T helper cell is a T helper 1 (Th1), a T helper 2 (Th2) cell, or a helper T cell expressing CD4 (CD4+ T cell). In some embodiments, immune effector cells are effector NK cells. In some embodiments, the immune effector cell is any other subset of T cells. The modified immune effector cell may express, in addition to the chimeric antigen receptor (CAR), an exogenous cytokine, a different chimeric receptor, or any other agent that would enhance immune effector cell signaling or function. For example, co-expression of the chimeric antigen receptor and a cytokine may enhance the CAR-T cell's ability to lyse a target cell.

[0310] Chimeric antigen receptors (CARs) as contemplated in the present disclosure may comprise an extracellular binding domain, a transmembrane domain, and an intracellular domain. Binding of an antigen to the extracellular binding domain can activate the CAR-T cell and generate an effector response, which includes CAR-T cell proliferation, cytokine production, and other processes that lead to the death of the antigen expressing cell. Exemplary CARs include those described in Maldini, et al. “Dual CD4-based CAR-T cells with distinct costimulatory domains mitigate HIV pathogenesis in vivo,” Nat. Med. 26:1776-1787 (2020); Maldini, et al. “HIV-Resistant and HIV-Specific CAR-Modified CD4+ T Cells Mitigate HIV Disease Progression and Confer CD4+ T Cell Help In Vivo,” Mol. Ther. 28:1585-1599 (2020); and Leibman, et al. “Supraphysiologic control over HIV-1 replication mediated by CD8 T cells expressing a re-engineered CD4-based chimeric antigen receptor,” PLoS Pathog. 13(10):e1006613(2017), the entire disclosure of each of which is incorporated herein by reference in its entirety for all purposes.

[0311] In some embodiments of the present disclosure, the chimeric antigen receptor further comprises a linker. In some embodiments, the linker is a (GGGGS)ₙ linker (SEQ ID NO: 247). In some embodiments, the linker is a (GGGGS)₃ linker (SEQ ID NO: 478). In some embodiments, a CAR of the present disclosure includes a leader peptide sequence (e.g., N-terminal to the antigen binding domain). An exemplary leader peptide amino acid sequence is:

(SEQ ID NO: 479)
METDTLLLWVLLLWVPGSTG.

[0312] Provided herein are also nucleic acids that encode the chimeric antigen receptors (CARs) described herein. In some embodiments, the nucleic acid molecule is isolated or purified. Delivery of the nucleic acid molecules ex vivo can be accomplished using methods known in the art. For example, immune cells obtained from a subject may be transformed with a nucleic acid vector encoding the chimeric antigen receptor. The vector may then be used to transform recipient immune cells so that these cells will then express the chimeric antigen receptor. Efficient means of transforming immune cells include transfection and transduction. Such methods are well known in the art. For example, applicable methods for delivery the nucleic acid molecule encoding the chimeric antigen receptor (and the nucleic acid(s) encoding the base editor) can be found in International Application No. PCT/US2009/040040 and U.S. Pat. Nos. 8,450,112; 9,132,153; and 9,669,058, each of which is incorporated herein in its entirety. Additionally, those methods and vectors described herein for delivering the nucleic acid encoding the base editor are applicable to delivering the nucleic acid encoding the chimeric antigen receptor.

[0313] Some aspects of the present disclosure provide for immune cells comprising a chimeric antigen receptor (CAR) and an altered endogenous gene that provides increased persistence, resistance to fratricide, enhances immune cell function, resistance to immunosuppression or inhibition, or a combination thereof. In some embodiments, the altered endogenous gene may be created by base editing. In some embodiments, the base editing may reduce or attenuate the gene expression. In some embodiments, the base editing may reduce or attenuate the gene activation. In some embodiments, the base editing may reduce or attenuate the functionality of the gene product. In some other embodiments, the base editing may activate or enhance the gene expression. In some embodiments, the base editing may increase the functionality of the gene product. In some embodiments, the altered endogenous gene may be modified or edited in an exon, an intron, an exon-intron injunction, or a regulatory element thereof. The modification may be edit to a single nucleobase in a gene or a regulatory element thereof. The modification may be in a exon, more than one exons, an intron, or more than one introns, or a combination thereof. The modification may be in an open reading frame of a gene. The modification may be in an untranslated region of the gene, for example, a 3′-UTR or a 5′-UTR. In some embodiments, the modification is in a regulatory element of an endogenous gene. In some embodiments, the modification is in a promoter, an enhancer, an operator, a silencer, an insulator, a terminator, a transcription initiation sequence, a translation initiation sequence (e.g. a Kozak sequence), or any combination thereof.

[0314] Allogeneic immune cells expressing an endogenous immune cell receptor, as well as a chimeric antigen receptor (CAR) may recognize and attack host cells, a circumstance termed graft versus host disease (GVHD). The alpha component of the immune cell receptor complex is encoded by the TRAC gene, and in some embodiments, this gene is edited such that the alpha subunit of the TCR complex is nonfunctional or absent. Because this subunit is necessary for endogenous immune cell signaling, editing this gene can reduce the risk of graft versus host disease caused by allogeneic immune cells.

[0315] In some embodiments, editing of genes to provide increased persistence, fratricide resistance, enhance the function of the immune cell or to reduce immunosuppression or inhibition can occur in the immune cell before the cell is transformed to express a chimeric antigen receptor (CAR). In other aspects, editing of genes to increase persistence, provide fratricide resistance, enhance the function of the immune cell or to reduce immunosuppression or inhibition can occur in a CAR-T cell, i.e., after the immune cell has been transformed to express a chimeric antigen receptor (CAR).

[0316] In some embodiments, the immune cell may comprise one or more edited genes, one or more regulatory elements thereof, or combinations thereof, wherein expression of the edited gene is either knocked out or knocked down. In some embodiments, the immune cell may comprise one or more edited genes, one or more regulatory elements thereof, or combinations thereof, wherein expression of the edited gene is increased. In some embodiments, the immune cell may comprise a chimeric antigen receptor (CAR) and one or more edited genes, one or more regulatory elements thereof, or combinations thereof, wherein expression of the edited gene is either knocked out or knocked down. In some embodiments, the immune cell may comprise a chimeric antigen receptor (CAR) and one or more edited genes, one or more regulatory elements thereof, or combinations thereof, wherein expression of the edited gene is increased.

[0317] In some embodiments, the CAR-T cells have reduced (e.g., a negative alteration of at least 10%, 25%, 50%, 75%, or 100%) or inactivated surface HLA class-I expression as compared to a similar CAR-T cell lacking one or more edited genes as described herein. In some embodiments, the CAR-T cells have increased persistence as compared to a similar CAR-T cell lacking one or more edited genes as described herein. In some embodiments, the CAR-T cells have increased fratricide resistance as compared to a similar CAR-T cell lacking one or more edited genes as described herein. In some embodiments, the CAR-T cells have reduced immunogenicity as compared to a similar CAR-T cell lacking one or more edited genes as described herein. In some embodiments, the CAR-T cells have lower activation threshold as compared to a similar CAR-T lacking one or more edited genes as described herein. In some embodiments, the CAR-T cells have increased anti-neoplasia activity as compared to a similar CAR-T cell lacking one or more edited genes as described herein. In some embodiments, the CAR-T cells have increased T- and/or NK-cell resistance as compared to a similar CAR-T cell lacking one or more edited genes as described herein. The one or more genes may be edited by base editing. In some embodiments the one or more genes are directed to components of the peptide loading complex (PLC) or regulatory components thereof. In some embodiments the one or more genes may be selected from a group consisting of: β2M, TAP1, TAP2, Tapasin, and CD58. In some the genes may be edited by base editing and or using a nuclease (e.g., Cas12b). In some embodiments, the one or more genes are selected from CD58, CD115, CD48, MICA, MICB, Nectin-2, ULBP, β2M, TAP1, TAP2, TAPBP, PDIA3, NLRC5, HLA-A, HLA-B, and/or HLA-C. In some embodiments, one or more additional genes may be edited using a base editor or nuclease. In some embodiments, the one or more additional genes may be selected from TRAC, and CIITA. In some embodiments, the one or more additional genes edited may be selected from HLA-E, HLA-G, PD-L1, and CD47. In some embodiments, one or more of β2M, TAP1, TAP2, Tapasin, and/or CD58 are edited in combination with edits in each of HLA-E, HLA-G, PD-L1, and CD47. In some embodiments, a β2M gene is not edited. In some embodiments, the CAR-T cells are base-edited to have reduced or eliminated HLA-A and HLA-B expression but unmodified HLA-C expression, and a β2M gene is not edited. In some embodiments, the CAR-T cells are base-edited to have reduced or eliminated HLA-A and HLA-B expression but unmodified HLA-C expression, and a β2M gene is not edited, and additionally, at least one additional gene is edited.

[0318] In some embodiments, an immune cell comprises a chimeric antigen receptor and one or more edited genes, a regulatory element thereof, or combinations thereof. An edited gene may be an immune response regulation gene, an immunogenic gene, a checkpoint inhibitor gene, a gene involved in immune responses, a cell surface marker, e.g. a T cell surface marker, or any combination thereof. In some embodiments, an immune cell comprises a chimeric antigen receptor and an edited gene that is associated with activated T cell proliferation, alpha-beta T cell activation, gamma-delta T cell activation, positive regulation of T cell proliferation, negative regulation of T-helper cell proliferation or differentiation, or their regulatory elements thereof, or combinations thereof. In some embodiments, the edited gene may be a checkpoint inhibitor gene, for example, such as a PD1 gene, a PDC1 gene, or a member related to or regulating the pathway of their formation or activation.

[0319] In some embodiments, provided herein is an immune cell with an edited gene in the peptide loading complex (PLC) or a regulatory element thereof, such that the immune cell does not express or expresses at reduced levels surface HLA class-I peptides. In some embodiments, provided herein is an immune cell with an edited gene in the peptide loading complex (PLC) or a regulatory element thereof, such that the immune cell has increased persistence. In some embodiments, the immune cell comprises an edited gene in the peptide loading complex (PLC) or a regulatory element thereof, and additionally, at least one edited gene.

[0320] In some embodiments, provided herein is an immune cell (e.g., T- or NK-cell) with an edited β2M gene, such that the immune cell does not express an endogenous functional Beta-2-microglobulin. In some embodiments, provided herein is an immune cell with an edited β2M gene, such that the immune cell does not express or expresses at reduced levels surface HLA class-I peptides. In some embodiments, provided herein is an immune cell with an edited β2M gene, such that the immune cell has increased persistence. In some embodiments, the immune cell comprises an edited β2M gene, and additionally, at least one edited gene.

[0321] In some embodiments, provided herein is an immune cell (e.g., T- or NK-cell) with an edited TAP1 gene, such that the immune cell does not express an endogenous functional TAP1. In some embodiments, provided herein is an immune cell with an edited TAP1 gene, such that the immune cell does not express or expresses at reduced levels surface HLA class-I peptides. In some embodiments, provided herein is an immune cell with an edited TAP1 gene, such that the immune cell has increased persistence. In some embodiments, the immune cell comprises an edited TAP1 gene, and additionally, at least one edited gene.

[0322] In some embodiments, provided herein is an immune cell (e.g., T- or NK-cell) with an edited TAP2 gene, such that the immune cell does not express an endogenous functional TAP2. In some embodiments, provided herein is an immune cell with an edited TAP2 gene, such that the immune cell does not express or expresses at reduced levels surface HLA class-I peptides. In some embodiments, provided herein is an immune cell with an edited TAP2 gene, such that the immune cell has increased persistence. In some embodiments, the immune cell comprises an edited TAP2 gene, and additionally, at least one edited gene.

[0323] In some embodiments, provided herein is an immune cell (e.g., T- or NK-cell) with edited TAP1 and TAP2 genes, such that the immune cell does not express endogenous functional TAP1 and TAP2. In some embodiments, provided herein is an immune cell with edited TAP1 and TAP2 genes, such that the immune cell does not express or expresses at reduced levels surface HLA class-I peptides. In some embodiments, provided herein is an immune cell with an edited TAP1 and TAP2 gene, such that the immune cell has increased persistence. In some embodiments, the immune cell comprises an edited TAP1 and TAP2 gene, and additionally, at least one edited gene.

[0324] In some embodiments, provided herein is an immune cell (e.g., T- or NK-cell) with an edited Tapasin gene, such that the immune cell does not express an endogenous functional Tapasin. In some embodiments, provided herein is an immune cell with an edited Tapasin gene, such that the immune cell does not express or expresses at reduced levels surface HLA class-I peptides. In some embodiments, provided herein is an immune cell with an edited Tapasin gene, such that the immune cell has increased persistence. In some embodiments, the immune cell comprises an edited Tapasin gene, and additionally, at least one edited gene.

[0325] In some embodiments, provided herein is an immune cell (e.g., T- or NK-cell) with an edited CD58 gene, such that the immune cell does not express an endogenous functional CD58. In some embodiments, provided herein is an immune cell with an edited CD58 gene, such that the immune cell has increased persistence. In some embodiments, the immune cell comprises an edited CD58 gene, and additionally, at least one edited gene.

[0326] In some embodiments, each edited gene may comprise a single base edit. In some embodiments, each edited gene may comprise multiple base edits at different regions of the gene. In some embodiments, a single modification event (such as electroporation), may introduce one or more gene edits. In some embodiments at least one, two, three, four, five, six, seven, eight, nine, ten, eleven, twelve, thirteen, fourteen, fifteen, sixteen, seventeen, eighteen, nineteen, twenty or more edits may be introduced in one or more genes simultaneously. In some embodiments, an immune cell, including but not limited to any immune cell comprising an edited gene selected from any of the aforementioned gene edits, can be edited to generate mutations in other genes that enhance the CAR-T's function or reduce immunosuppression or inhibition of the cell.

### Editing of Target Polynucleotides in Immune Cells

[0327] In general, base editing is carried out to induce therapeutic changes in the genome of a cell (e.g., immune cell (e.g., T- or NK-cell)). Base editing can be carried out in vitro or in vivo. In various embodiments, base editing can be used to introduce a stop codon to a gene, to disrupt a splice motif (e.g., a acceptor site, or a splice donor site) (see FIG. 36). In some embodiments, cells (e.g., immune cell (e.g., T- or NK-cell)) are collected from a subject or a donor. In some embodiments, base editing is carried out to induce therapeutic changes in the genome of an immune cell (e.g., T- or NK-cell). In some embodiments, base editing is carried out to induce therapeutic changes in the genome of an allogeneic immune cell (e.g., T- or NK-cell) of a subject. In some embodiments, base editing is carried out to induce therapeutic changes in the genome of an allogeneic CAR-T cell.

[0328] To produce the gene edits described above, immune cells are collected from a subject and contacted with one or more guide RNAs and a nucleobase editor polypeptide comprising a nucleic acid programmable DNA binding protein (napDNAbp) and a cytidine deaminase or adenosine deaminase, or comprising one or more deaminases with cytidine deaminase and/or adenosine deaminase activity (e.g., a “dual deaminase” which has cytidine and adenosine deaminase activity). In some embodiments, cells to be edited are contacted with at least one nucleic acid, wherein the at least one nucleic acid encodes one or more guide RNAs and a nucleobase editor polypeptide comprising a nucleic acid programmable DNA binding protein (napDNAbp) and a cytidine deaminase. In some embodiments, the gRNA comprises nucleotide analogs. In some instances, the gRNA is added directly to a cell. These nucleotide analogs can inhibit degradation of the gRNA from cellular processes. Tables 1A-1E and SEQ ID NOs: 1214-2908, 403-412, and 435-446 provide representative target sequences and spacer sequences to be used for gRNAs, as well as representative gRNA sequences.

[0329] In some embodiments, immune cells (e.g., T- or NK-cell) of the present disclosure, are contacted with one or more guide RNAs and a nucleobase editor polypeptide comprising a nucleic acid programmable DNA binding protein (napDNAbp) (e.g., Cas9) domain and a deaminase (e.g., cytidine deaminase and/or adenosine deaminase) domain. In some embodiments, immune cells (e.g., T- or NK-cell) of the present disclosure, are contacted with one or more guide RNAs and a nucleobase editor polypeptide comprising a nucleic acid programmable DNA binding protein (napDNAbp) (e.g., Cas9) domain and an adenosine deaminase domain. In some embodiments, immune cells (e.g., T- or NK-cell) of the present disclosure, are contacted with one or more guide RNAs and a nucleobase editor polypeptide comprising a nucleic acid programmable DNA binding protein (napDNAbp) (e.g., Cas9) domain and a cytidine deaminase domain. In some embodiments, immune cells (e.g., T- or NK-cell) of the present disclosure, are contacted with one or more guide RNAs and a nucleobase editor polypeptide comprising a nucleic acid programmable DNA binding protein (napDNAbp) (e.g., Cas9) domain and an adenosine/cytidine deaminase domain. In some embodiments, the at least one nucleic acid molecule encoding one or more guide RNAs and a nucleobase editor polypeptide is delivered to cells by one or more vectors (e.g., AAV vector).

[0330] In some embodiments, one or more vectors (e.g., AAV vector) comprise at least one nucleic acid molecule encoding one or more guide RNAs and a nucleobase editor polypeptide, which comprises a nucleic acid programmable DNA binding protein (napDNAbp) (e.g., Cas9) domain and a deaminase (e.g., cytidine deaminase and/or adenosine deaminase) domain. In some embodiments, one or more vectors (e.g., AAV vector) comprise at least one nucleic acid molecule encoding one or more guide RNAs, which direct a nucleobase editor polypeptide to edit a site in the genome of a cell (e.g., immune cell (e.g., T- or NK-cell)).

[0331] The present disclosure provides one or more guide RNAs that direct a nucleobase editor polypeptide to edit a site in the genome of the cell (e.g., immune cell (e.g., T- or NK-cell)). In some embodiments, the present disclosure provides guide RNAs that target components of the peptide loading complex (PLC) (e.g., β2M, TAP1, TAP2, Tapasin) and/or CD58 in an immune cell (e.g., T- or NK-cell). In some embodiments, the present disclosure provides guide RNAs that target β2M, TAP1, TAP2, Tapasin, and/or CD58. In some embodiments, the gRNA comprises nucleotide analogs. These nucleotide analogs can inhibit degradation of the gRNA from cellular processes. Exemplary guide spacer sequences, gRNA sequences, and target sequences are provided in the following Tables 1A-1E and as SEQ ID NOs: 1214-2908, 403-412, and 435-446.

[0332] In various instances, it is advantageous for a spacer sequence to include a 5′ and/or a 3′ “G” nucleotide. In some cases, for example, any spacer sequence or guide polynucleotide provided herein comprises or further comprises a 5′ “G”, where, in some embodiments, the 5′ “G” is or is not complementary to a target sequence. In some embodiments, the 5′ “G” is added to a spacer sequence that does not already contain a 5′ “G.” For example, it can be advantageous for a guide RNA to include a 5′ terminal “G” when the guide RNA is expressed under the control of a U6 promoter or the like because the U6 promoter prefers a “G” at the transcription start site (see Cong, L. et al. “Multiplex genome engineering using CRISPR/Cas systems. Science 339:819-823 (2013) doi: 10.1126/science.1231143). In some cases, a 5′ terminal “G” is added to a guide polynucleotide that is to be expressed under the control of a promoter, but is optionally not added to the guide polynucleotide if or when the guide polynucleotide is not expressed under the control of a promoter.

TABLE 1A
Guide RNAs

| | | | | | | Guide |
|---|---|---|---|---|---|---|
| | | | | | | with |
| | | | | | | Guide |
| | | | | | | Scaf- |
| | | | | Guide | | fold |
| | | | | SEQ | | SEQ |
| Guide | | Base | Spacer | ID | | ID |
| No. | Gene | Editor | Sequence | NO: | gRNA sequence | NO: |
| Guide 443 | TAP1 | ABE/CB | AGACCUGGCUAUGG | 480 | AGACCUGGCUAUGGUGAGAAGUUUUAGAGCUAGAAAU | 575 |
| | | E/CABE | UGAGAA | | AGCAAGUUAAAAUAAGGCUAGUCCGUUAUCAACUUGA | |
| | | | | | AAAAGUGGCACCGAGUCGGUGCUUUU | |
| Guide 444 | TAP1 | CBE | GCACUGCACUAUAA | 481 | GCACUGCACUAUAAAGAACCGUUUUAGAGCUAGAAAU | 576 |
| | | | AGAACC | | AGCAAGUUAAAAUAAGGCUAGUCCGUUAUCAACUUGA | |
| | | | | | AAAAGUGGCACCGAGUCGGUGCUUUU | |
| Guide 445 | TAP1 | ABE | UAGUGCAGUGCUGG | 482 | UAGUGCAGUGCUGGAGUUCGGUUUUAGAGCUAGAAAU | 577 |
| | | | AGUUCG | | AGCAAGUUAAAAUAAGGCUAGUCCGUUAUCAACUUGA | |
| | | | | | AAAAGUGGCACCGAGUCGGUGCUUUU | |
| Guide 446 | TAP1 | ABE/CB | AGAAACCUGUCUGG | 483 | AGAAACCUGUCUGGUUCUGUGUUUUAGAGCUAGAAAU | 578 |
| | | E/CABE | UUCUGU | | AGCAAGUUAAAAUAAGGCUAGUCCGUUAUCAACUUGA | |
| | | | | | AAAAGUGGCACCGAGUCGGUGCUUUU | |
| Guide 447 | TAP1 | CBE | UGAUGUUACCUGCA | 484 | UGAUGUUACCUGCAGGGUUGGUUUUAGAGCUAGAAAU | 579 |
| | | | GGGUUG | | AGCAAGUUAAAAUAAGGCUAGUCCGUUAUCAACUUGA | |
| | | | | | AAAAGUGGCACCGAGUCGGUGCUUUU | |
| Guide 448 | TAP1 | ABE | CUGCAGGUAACAUC | 485 | CUGCAGGUAACAUCAUGUCUGUUUUAGAGCUAGAAAU | 580 |
| | | | AUGUCU | | AGCAAGUUAAAAUAAGGCUAGUCCGUUAUCAACUUGA | |
| | | | | | AAAAGUGGCACCGAGUCGGUGCUUUU | |
| Guide 449 | TAP1 | CBE | ACCAGGUAUGUUCA | 486 | ACCAGGUAUGUUCAUGGAGUGUUUUAGAGCUAGAAAU | 581 |
| | | | UGGAGU | | AGCAAGUUAAAAUAAGGCUAGUCCGUUAUCAACUUGA | |
| | | | | | AAAAGUGGCACCGAGUCGGUGCUUUU | |
| Guide 450 | TAP1 | CBE | UUCCAGCAACUGUG | 487 | UUCCAGCAACUGUGGAUACAGUUUUAGAGCUAGAAAU | 582 |
| | | | GAUACA | | AGCAAGUUAAAAUAAGGCUAGUCCGUUAUCAACUUGA | |
| | | | | | AAAAGUGGCACCGAGUCGGUGCUUUU | |
| Guide 451 | TAP1 | ABE | UCCACAGUUGCUGG | 488 | UCCACAGUUGCUGGAAGUGCGUUUUAGAGCUAGAAAU | 583 |
| | | | AAGUGC | | AGCAAGUUAAAAUAAGGCUAGUCCGUUAUCAACUUGA | |
| | | | | | AAAAGUGGCACCGAGUCGGUGCUUUU | |
| Guide 452 | TAP1 | ABE/CB | GGUGCUCACACUAG | 489 | GGUGCUCACACUAGUGGUCCGUUUUAGAGCUAGAAAU | 584 |
| | | E/CABE | UGGUCC | | AGCAAGUUAAAAUAAGGCUAGUCCGUUAUCAACUUGA | |
| | | | | | AAAAGUGGCACCGAGUCGGUGCUUUU | |
| Guide 453 | TAP1 | ABE/CB | GGGACCUCACCUCC | 490 | GGGACCUCACCUCCACAGCCGUUUUAGAGCUAGAAAU | 585 |
| | | E/CABE | ACAGCC | | AGCAAGUUAAAAUAAGGCUAGUCCGUUAUCAACUUGA | |
| | | | | | AAAAGUGGCACCGAGUCGGUGCUUUU | |
| Guide 454 | TAP1 | ABE/CB | GGACCUCACCUCCA | 491 | GGACCUCACCUCCACAGCCUGUUUUAGAGCUAGAAAU | 586 |
| | | E/CABE | CAGCCU | | AGCAAGUUAAAAUAAGGCUAGUCCGUUAUCAACUUGA | |
| | | | | | AAAAGUGGCACCGAGUCGGUGCUUUU | |
| Guide 455 | TAP1 | ABE/CB | AUACCUGCCUGUGC | 492 | AUACCUGCCUGUGCAGGUAGGUUUUAGAGCUAGAAAU | 587 |
| | | E | AGGUAG | | AGCAAGUUAAAAUAAGGCUAGUCCGUUAUCAACUUGA | |
| | | | | | AAAAGUGGCACCGAGUCGGUGCUUUU | |
| Guide 456 | TAP1 | ABE/CB | GCUUCCAUACCUGC | 493 | GCUUCCAUACCUGCCUGUGCGUUUUAGAGCUAGAAAU | 588 |
| | | E/CABE | CUGUGC | | AGCAAGUUAAAAUAAGGCUAGUCCGUUAUCAACUUGA | |
| | | | | | AAAAGUGGCACCGAGUCGGUGCUUUU | |
| Guide 457 | TAP1 | ABE | UCAUCUCAGGUGGC | 494 | UCAUCUCAGGUGGCUGCAGUGUUUUAGAGCUAGAAAU | 589 |
| | | | UGCAGU | | AGCAAGUUAAAAUAAGGCUAGUCCGUUAUCAACUUGA | |
| | | | | | AAAAGUGGCACCGAGUCGGUGCUUUU | |
| Guide 458 | TAP1 | ABE | UUCAUCUCAGGUGG | 495 | UUCAUCUCAGGUGGCUGCAGGUUUUAGAGCUAGAAAU | 590 |
| | | | CUGCAG | | AGCAAGUUAAAAUAAGGCUAGUCCGUUAUCAACUUGA | |
| | | | | | AAAAGUGGCACCGAGUCGGUGCUUUU | |
| Guide 459 | TAP1 | ABE/CB | GUACCUGUGUCAUA | 496 | GUACCUGUGUCAUAGCCCUGGUUUUAGAGCUAGAAAU | 591 |
| | | E/CABE | GCCCUG | | AGCAAGUUAAAAUAAGGCUAGUCCGUUAUCAACUUGA | |
| | | | | | AAAAGUGGCACCGAGUCGGUGCUUUU | |
| Guide 460 | TAP1 | CBE | GUCUACCUCUGCAG | 497 | GUCUACCUCUGCAGAGCAAAGUUUUAGAGCUAGAAAU | 592 |
| | | | AGCAAA | | AGCAAGUUAAAAUAAGGCUAGUCCGUUAUCAACUUGA | |
| | | | | | AAAAGUGGCACCGAGUCGGUGCUUUU | |
| Guide 461 | TAP1 | CBE | CGUCUACCUCUGCA | 498 | CGUCUACCUCUGCAGAGCAAGUUUUAGAGCUAGAAAU | 593 |
| | | | GAGCAA | | AGCAAGUUAAAAUAAGGCUAGUCCGUUAUCAACUUGA | |
| | | | | | AAAAGUGGCACCGAGUCGGUGCUUUU | |
| Guide 462 | TAP1 | ABE | CUGCAGAGGUAGAC | 499 | CUGCAGAGGUAGACGAGGCUGUUUUAGAGCUAGAAAU | 594 |
| | | | GAGGCU | | AGCAAGUUAAAAUAAGGCUAGUCCGUUAUCAACUUGA | |
| | | | | | AAAAGUGGCACCGAGUCGGUGCUUUU | |
| Guide 463 | TAP1 | ABE | UCUGCAGAGGUAGA | 500 | UCUGCAGAGGUAGACGAGGCGUUUUAGAGCUAGAAAU | 595 |
| | | | CGAGGC | | AGCAAGUUAAAAUAAGGCUAGUCCGUUAUCAACUUGA | |
| | | | | | AAAAGUGGCACCGAGUCGGUGCUUUU | |
| Guide 464 | TAP1 | ABE | UUGCUCUGCAGAGG | 501 | UUGCUCUGCAGAGGUAGACGGUUUUAGAGCUAGAAAU | 596 |
| | | | UAGACG | | AGCAAGUUAAAAUAAGGCUAGUCCGUUAUCAACUUGA | |
| | | | | | AAAAGUGGCACCGAGUCGGUGCUUUU | |
| Guide 465 | TAP1 | ABE | CUCCACCUGAGGAA | 502 | CUCCACCUGAGGAAAGACAUGUUUUAGAGCUAGAAAU | 597 |
| | | | AGACAU | | AGCAAGUUAAAAUAAGGCUAGUCCGUUAUCAACUUGA | |
| | | | | | AAAAGUGGCACCGAGUCGGUGCUUUU | |
| Guide 466 | TAP2 | ABE/CB | CUGACUCACCCAAA | 503 | CUGACUCACCCAAAACAGCAGUUUUAGAGCUAGAAAU | 598 |
| | | E/CABE | ACAGCA | | AGCAAGUUAAAAUAAGGCUAGUCCGUUAUCAACUUGA | |
| | | | | | AAAAGUGGCACCGAGUCGGUGCUUUU | |
| Guide 467 | TAP2 | ABE/CB | CACCCAAAACAGCA | 504 | CACCCAAAACAGCAAGGACAGUUUUAGAGCUAGAAAU | 599 |
| | | E/CABE | AGGACA | | AGCAAGUUAAAAUAAGGCUAGUCCGUUAUCAACUUGA | |
| | | | | | AAAAGUGGCACCGAGUCGGUGCUUUU | |
| Guide 468 | TAP2 | ABE/CB | CCUACCUGCCAAAG | 505 | CCUACCUGCCAAAGGAGAAGGUUUUAGAGCUAGAAAU | 600 |
| | | E/CABE | GAGAAG | | AGCAAGUUAAAAUAAGGCUAGUCCGUUAUCAACUUGA | |
| | | | | | AAAAGUGGCACCGAGUCGGUGCUUUU | |
| Guide 469 | TAP2 | ABE | CCCCACAGCUCACU | 506 | CCCCACAGCUCACUGUCUGCGUUUUAGAGCUAGAAAU | 601 |
| | | | GUCUGC | | AGCAAGUUAAAAUAAGGCUAGUCCGUUAUCAACUUGA | |
| | | | | | AAAAGUGGCACCGAGUCGGUGCUUUU | |
| Guide 470 | TAP2 | CBE | CAGACAGUGAGCUG | 507 | CAGACAGUGAGCUGUGGGGUGUUUUAGAGCUAGAAAU | 602 |
| | | | UGGGGU | | AGCAAGUUAAAAUAAGGCUAGUCCGUUAUCAACUUGA | |
| | | | | | AAAAGUGGCACCGAGUCGGUGCUUUU | |
| Guide 471 | TAP2 | ABE/ | CCCCACCUGUCUUA | 508 | CCCCACCUGUCUUAGUCUCCGUUUUAGAGCUAGAAAU | 603 |
| | | CBE/ | GUCUCC | | AGCAAGUUAAAAUAAGGCUAGUCCGUUAUCAACUUGA | |
| | | CABE | | | AAAAGUGGCACCGAGUCGGUGCUUUU | |
| Guide 472 | TAP2 | ABE | UCUUAGGGGAGCUG | 509 | UCUUAGGGGAGCUGAACUCAGUUUUAGAGCUAGAAAU | 604 |
| | | | AACUCA | | AGCAAGUUAAAAUAAGGCUAGUCCGUUAUCAACUUGA | |
| | | | | | AAAAGUGGCACCGAGUCGGUGCUUUU | |
| Guide 473 | TAP2 | CBE | UCCCCUAAGAAGGA | 510 | UCCCCUAAGAAGGACAGAGCGUUUUAGAGCUAGAAAU | 605 |
| | | | CAGAGC | | AGCAAGUUAAAAUAAGGCUAGUCCGUUAUCAACUUGA | |
| | | | | | AAAAGUGGCACCGAGUCGGUGCUUUU | |
| Guide 474 | TAP2 | CBE | AUCAGGUGAGCGUG | 511 | AUCAGGUGAGCGUGCAUGUAGUUUUAGAGCUAGAAAU | 606 |
| | | | CAUGUA | | AGCAAGUUAAAAUAAGGCUAGUCCGUUAUCAACUUGA | |
| | | | | | AAAAGUGGCACCGAGUCGGUGCUUUU | |
| Guide 475 | TAP2 | ABE | UCUUCCAGGUGCUG | 512 | UCUUCCAGGUGCUGCACUUGGUUUUAGAGCUAGAAAU | 607 |
| | | | CACUUG | | AGCAAGUUAAAAUAAGGCUAGUCCGUUAUCAACUUGA | |
| | | | | | AAAAGUGGCACCGAGUCGGUGCUUUU | |
| Guide 476 | TAP2 | ABE | CUCUUCCAGGUGCU | 513 | CUCUUCCAGGUGCUGCACUUGUUUUAGAGCUAGAAAU | 608 |
| | | | GCACUU | | AGCAAGUUAAAAUAAGGCUAGUCCGUUAUCAACUUGA | |
| | | | | | AAAAGUGGCACCGAGUCGGUGCUUUU | |
| Guide 477 | TAP2 | ABE | CCUCUUCCAGGUGC | 514 | CCUCUUCCAGGUGCUGCACUGUUUUAGAGCUAGAAAU | 609 |
| | | | UGCACU | | AGCAAGUUAAAAUAAGGCUAGUCCGUUAUCAACUUGA | |
| | | | | | AAAAGUGGCACCGAGUCGGUGCUUUU | |
| Guide 478 | TAP2 | ABE | CUUCCAGGUGCUGC | 515 | CUUCCAGGUGCUGCACUUGGGUUUUAGAGCUAGAAAU | 610 |
| | | | ACUUGG | | AGCAAGUUAAAAUAAGGCUAGUCCGUUAUCAACUUGA | |
| | | | | | AAAAGUGGCACCGAGUCGGUGCUUUU | |
| Guide 479 | TAP2 | CBE | CAGGGUCUGGAAAA | 516 | CAGGGUCUGGAAAACAGGAAGUUUUAGAGCUAGAAAU | 611 |
| | | | CAGGAA | | AGCAAGUUAAAAUAAGGCUAGUCCGUUAUCAACUUGA | |
| | | | | | AAAAGUGGCACCGAGUCGGUGCUUUU | |
| Guide 480 | TAP2 | CBE | AGGGUCUGGAAAAC | 517 | AGGGUCUGGAAAACAGGAAUGUUUUAGAGCUAGAAAU | 612 |
| | | | AGGAAU | | AGCAAGUUAAAAUAAGGCUAGUCCGUUAUCAACUUGA | |
| | | | | | AAAAGUGGCACCGAGUCGGUGCUUUU | |
| Guide 481 | TAP2 | ABE/CB | CUUUCAGGCACCUU | 518 | CUUUCAGGCACCUUGAGCACGUUUUAGAGCUAGAAAU | 613 |
| | | E/CABE | GAGCAC | | AGCAAGUUAAAAUAAGGCUAGUCCGUUAUCAACUUGA | |
| | | | | | AAAAGUGGCACCGAGUCGGUGCUUUU | |
| Guide 482 | TAP2 | ABE/CB | CCUCACCCACCUGG | 519 | CCUCACCCACCUGGCUGUGCGUUUUAGAGCUAGAAAU | 614 |
| | | E/CABE | CUGUGC | | AGCAAGUUAAAAUAAGGCUAGUCCGUUAUCAACUUGA | |
| | | | | | AAAAGUGGCACCGAGUCGGUGCUUUU | |
| Guide 483 | TAP2 | ABE | CUGCACAGGUGGUU | 520 | CUGCACAGGUGGUUUCAGUUGUUUUAGAGCUAGAAAU | 615 |
| | | | UCAGUU | | AGCAAGUUAAAAUAAGGCUAGUCCGUUAUCAACUUGA | |
| | | | | | AAAAGUGGCACCGAGUCGGUGCUUUU | |
| Guide 484 | TAP2 | ABE | GCUGCACAGGUGGU | 521 | GCUGCACAGGUGGUUUCAGUGUUUUAGAGCUAGAAAU | 616 |
| | | | UUCAGU | | AGCAAGUUAAAAUAAGGCUAGUCCGUUAUCAACUUGA | |
| | | | | | AAAAGUGGCACCGAGUCGGUGCUUUU | |
| Guide 485 | TAP2 | CBE | CCACCUGUGCAGCA | 522 | CCACCUGUGCAGCAGGGACAGUUUUAGAGCUAGAAAU | 617 |
| | | | GGGACA | | AGCAAGUUAAAAUAAGGCUAGUCCGUUAUCAACUUGA | |
| | | | | | AAAAGUGGCACCGAGUCGGUGCUUUU | |
| Guide 486 | TAP2 | CBE | CACCUGUGCAGCAG | 523 | CACCUGUGCAGCAGGGACAGGUUUUAGAGCUAGAAAU | 618 |
| | | | GGACAG | | AGCAAGUUAAAAUAAGGCUAGUCCGUUAUCAACUUGA | |
| | | | | | AAAAGUGGCACCGAGUCGGUGCUUUU | |
| Guide 487 | TAP2 | CBE | ACCACCUGUGCAGC | 524 | ACCACCUGUGCAGCAGGGACGUUUUAGAGCUAGAAAU | 619 |
| | | | AGGGAC | | AGCAAGUUAAAAUAAGGCUAGUCCGUUAUCAACUUGA | |
| | | | | | AAAAGUGGCACCGAGUCGGUGCUUUU | |
| Guide 488 | TAP2 | ABE | UCCUCAGAUGUAGG | 525 | UCCUCAGAUGUAGGGGAGAAGUUUUAGAGCUAGAAAU | 620 |
| | | | GGAGAA | | AGCAAGUUAAAAUAAGGCUAGUCCGUUAUCAACUUGA | |
| | | | | | AAAAGUGGCACCGAGUCGGUGCUUUU | |
| Guide 489 | TAP2 | ABE | UUCCUCAGAUGUAG | 526 | UUCCUCAGAUGUAGGGGAGAGUUUUAGAGCUAGAAAU | 621 |
| | | | GGGAGA | | AGCAAGUUAAAAUAAGGCUAGUCCGUUAUCAACUUGA | |
| | | | | | AAAAGUGGCACCGAGUCGGUGCUUUU | |
| Guide 518 | TAP1.1 | ABE | UCGCCGACUGGGUG | 527 | UCGCCGACUGGGUGCUGCUCGUUUUAGAGCUAGAAAU | 622 |
| | | | CUGCUC | | AGCAAGUUAAAAUAAGGCUAGUCCGUUAUCAACUUGA | |
| | | | | | AAAAGUGGCACCGAGUCGGUGCUUUU | |
| Guide 519 | TAP1.2 | CBE | GUGCUCUUCCCAGA | 528 | GUGCUCUUCCCAGACCCAUUGUUUUAGAGCUAGAAAU | 623 |
| | AND | | CCCAUU | | AGCAAGUUAAAAUAAGGCUAGUCCGUUAUCAACUUGA | |
| | TAP2 | | | | AAAAGUGGCACCGAGUCGGUGCUUUU | |
| Guide 520 | TAP1.3 | CBE | UGUGCUCUUCCCAG | 529 | UGUGCUCUUCCCAGACCCAUGUUUUAGAGCUAGAAAU | 624 |
| | AND TAP | | ACCCAU | | AGCAAGUUAAAAUAAGGCUAGUCCGUUAUCAACUUGA | |
| | 2 | | | | AAAAGUGGCACCGAGUCGGUGCUUUU | |
| Guide 521 | TAP1.4 | CBE | UGGGUCUGGGAAGA | 530 | UGGGUCUGGGAAGAGCACAGGUUUUAGAGCUAGAAAU | 625 |
| | | | GCACAG | | AGCAAGUUAAAAUAAGGCUAGUCCGUUAUCAACUUGA | |
| | | | | | AAAAGUGGCACCGAGUCGGUGCUUUU | |
| Guide 522 | TAP1.5 | CBE | GUCGCUGACCCCCU | 531 | GUCGCUGACCCCCUGACAGCGUUUUAGAGCUAGAAAU | 626 |
| | | | GACAGC | | AGCAAGUUAAAAUAAGGCUAGUCCGUUAUCAACUUGA | |
| | | | | | AAAAGUGGCACCGAGUCGGUGCUUUU | |
| Guide 523 | TAP1.6 | CBE, | UCAGCGACAGGCAG | 532 | UCAGCGACAGGCAGUGGCGUGUUUUAGAGCUAGAAAU | 627 |
| | | ABE | UGGCGU | | AGCAAGUUAAAAUAAGGCUAGUCCGUUAUCAACUUGA | |
| | | | | | AAAAGUGGCACCGAGUCGGUGCUUUU | |
| Guide 524 | TAP1.7 | ABE | GGAUAAGUACACAC | 533 | GGAUAAGUACACACGGUUUCGUUUUAGAGCUAGAAAU | 628 |
| | | | GGUUUC | | AGCAAGUUAAAAUAAGGCUAGUCCGUUAUCAACUUGA | |
| | | | | | AAAAGUGGCACCGAGUCGGUGCUUUU | |
| Guide 525 | TAP1.8 | CBE, | UCAUCCAGGAUAAG | 534 | UCAUCCAGGAUAAGUACACAGUUUUAGAGCUAGAAAU | 629 |
| | | ABE | UACACA | | AGCAAGUUAAAAUAAGGCUAGUCCGUUAUCAACUUGA | |
| | | | | | AAAAGUGGCACCGAGUCGGUGCUUUU | |
| Guide 526 | TAP1.9 | CBE, | GGGCACUGGUGGCA | 535 | GGGCACUGGUGGCAUCAUCCGUUUUAGAGCUAGAAAU | 630 |
| | | ABE | UCAUCC | | AGCAAGUUAAAAUAAGGCUAGUCCGUUAUCAACUUGA | |
| | | | | | AAAAGUGGCACCGAGUCGGUGCUUUU | |
| Guide 527 | TAP1.10 | CBE, | GUUUGCAUCCAGGG | 536 | GUUUGCAUCCAGGGCACUGGGUUUUAGAGCUAGAAAU | 631 |
| | | ABE | CACUGG | | AGCAAGUUAAAAUAAGGCUAGUCCGUUAUCAACUUGA | |
| | | | | | AAAAGUGGCACCGAGUCGGUGCUUUU | |
| Guide 528 | TAP1.11 | ABE | CAUCACCCAGCACC | 537 | CAUCACCCAGCACCUCAGCCGUUUUAGAGCUAGAAAU | 632 |
| | | | UCAGCC | | AGCAAGUUAAAAUAAGGCUAGUCCGUUAUCAACUUGA | |
| | | | | | AAAAGUGGCACCGAGUCGGUGCUUUU | |
| Guide 529 | TAP1.12 | ABE | CACCCAGCACCUCA | 538 | CACCCAGCACCUCAGCCUGGGUUUUAGAGCUAGAAAU | 633 |
| | | | GCCUGG | | AGCAAGUUAAAAUAAGGCUAGUCCGUUAUCAACUUGA | |
| | | | | | AAAAGUGGCACCGAGUCGGUGCUUUU | |
| Guide 530 | TAP2.1 | ABE | GGUGGACGCGGCUU | 539 | GGUGGACGCGGCUUUACUGGUUUUAGAGCUAGAAAUA | 634 |
| | | | UACUG | | GCAAGUUAAAAUAAGGCUAGUCCGUUAUCAACUUGAA | |
| | | | | | AAAGUGGCACCGAGUCGGUGCUUUU | |
| Guide 531 | TAP2.4 | ABE | UGCGGGACAGAAAC | 540 | UGCGGGACAGAAACAACGUCGUUUUAGAGCUAGAAAU | 635 |
| | | | AACGUC | | AGCAAGUUAAAAUAAGGCUAGUCCGUUAUCAACUUGA | |
| | | | | | AAAAGUGGCACCGAGUCGGUGCUUUU | |
| Guide 532 | TAP2.5 | CBE, | GGACCCGCGGGUCU | 541 | GGACCCGCGGGUCUCGUACAGUUUUAGAGCUAGAAAU | 636 |
| | | ABE | CGUACA | | AGCAAGUUAAAAUAAGGCUAGUCCGUUAUCAACUUGA | |
| | | | | | AAAAGUGGCACCGAGUCGGUGCUUUU | |
| Guide 533 | TAP2.6 | CBE, | CAUCCAGGAUGAGG | 542 | CAUCCAGGAUGAGGACCCGCGUUUUAGAGCUAGAAAU | 637 |
| | | ABE | ACCCGC | | AGCAAGUUAAAAUAAGGCUAGUCCGUUAUCAACUUGA | |
| | | | | | AAAAGUGGCACCGAGUCGGUGCUUUU | |
| Guide 534 | TAP2.7 | CBE, | UCAUCCAGGAUGAG | 543 | UCAUCCAGGAUGAGGACCCGGUUUUAGAGCUAGAAAU | 638 |
| | | ABE | GACCCG | | AGCAAGUUAAAAUAAGGCUAGUCCGUUAUCAACUUGA | |
| | | | | | AAAAGUGGCACCGAGUCGGUGCUUUU | |
| Guide 535 | TAP2.8 | CBE | GCGGGUCCUCAUCC | 544 | GCGGGUCCUCAUCCUGGAUGGUUUUAGAGCUAGAAAU | 639 |
| | | | UGGAUG | | AGCAAGUUAAAAUAAGGCUAGUCCGUUAUCAACUUGA | |
| | | | | | AAAAGUGGCACCGAGUCGGUGCUUUU | |
| Guide 536 | TAP2.9 | CBE, | GGGCACUAGUAGCC | 545 | GGGCACUAGUAGCCUCAUCCGUUUUAGAGCUAGAAAU | 640 |
| | | ABE | UCAUCC | | AGCAAGUUAAAAUAAGGCUAGUCCGUUAUCAACUUGA | |
| | | | | | AAAAGUGGCACCGAGUCGGUGCUUUU | |
| Guide 537 | TAP2.10 | ABE | CCUAGAUGUGCAGU | 546 | CCUAGAUGUGCAGUGCGAGCGUUUUAGAGCUAGAAAU | 641 |
| | | | GCGAGC | | AGCAAGUUAAAAUAAGGCUAGUCCGUUAUCAACUUGA | |
| | | | | | AAAAGUGGCACCGAGUCGGUGCUUUU | |
| Guide 415 | ß2M- | CBE, | ACUCACGCUGGAUA | 547 | ACUCACGCUGGAUAGCCUCCGUUUUAGAGCUAGAAAU | 642 |
| | 20mer | ABE | GCCUCC | | AGCAAGUUAAAAUAAGGCUAGUCCGUUAUCAACUUGA | |
| | | | | | AAAAGUGGCACCGAGUCGGUGCUUUU | |
| Guide 416 | ß2M | CBE | CACAGCCCAAGAUA | 548 | CACAGCCCAAGAUAGUUAAGGUUUUAGAGCUAGAAAU | 643 |
| | | | GUUAAG | | AGCAAGUUAAAAUAAGGCUAGUCCGUUAUCAACUUGA | |
| | | | | | AAAAGUGGCACCGAGUCGGUGCUUUU | |
| Guide 417 | ß2M | CBE | ACAGCCCAAGAUAG | 549 | ACAGCCCAAGAUAGUUAAGUGUUUUAGAGCUAGAAAU | 644 |
| (b2m 315 | | | UUAAGU | | AGCAAGUUAAAAUAAGGCUAGUCCGUUAUCAACUUGA | |
| ) | | | | | AAAAGUGGCACCGAGUCGGUGCUUUU | |
| Guide 418 | ß2M | CBE | CAGCCCAAGAUAGU | 550 | CAGCCCAAGAUAGUUAAGUGGUUUUAGAGCUAGAAAU | 645 |
| (b2m_316 | | | UAAGUG | | AGCAAGUUAAAAUAAGGCUAGUCCGUUAUCAACUUGA | |
| ) | | | | | AAAAGUGGCACCGAGUCGGUGCUUUU | |
| Guide 419 | B2M | CBE, | UUACCCCACUUAAC | 551 | UUACCCCACUUAACUAUCUUGUUUUAGAGCUAGAAAU | 646 |
| | | ABE | UAUCUU | | AGCAAGUUAAAAUAAGGCUAGUCCGUUAUCAACUUGA | |
| | | | | | AAAAGUGGCACCGAGUCGGUGCUUUU | |
| Guide 420 | ß2M | CBE. | CUUACCCCACUUAA | 552 | CUUACCCCACUUAACUAUCUGUUUUAGAGCUAGAAAU | 647 |
| (TSBTx76 | | ABE | CUAUCU | | AGCAAGUUAAAAUAAGGCUAGUCCGUUAUCAACUUGA | |
| 0) | | | | | AAAAGUGGCACCGAGUCGGUGCUUUU | |
| Guide 421 | B2M | ABE | UCGAUCUAUGAAAA | 553 | UCGAUCUAUGAAAAAGACAGGUUUUAGAGCUAGAAAU | 648 |
| | | | AGACAG | | AGCAAGUUAAAAUAAGGCUAGUCCGUUAUCAACUUGA | |
| | | | | | AAAAGUGGCACCGAGUCGGUGCUUUU | |
| Guide 422 | B2M- | CBE, | CUCACGCUGGAUAG | 554 | CUCACGCUGGAUAGCCUCCGUUUUAGAGCUAGAAAUA | 649 |
| | 19mer | ABE | CCUCC | | GCAAGUUAAAAUAAGGCUAGUCCGUUAUCAACUUGAA | |
| | | | | | AAAGUGGCACCGAGUCGGUGCUUUU | |
| Guide 423 | ß2M- | CBE, | UCACGCUGGAUAGC | 555 | UCACGCUGGAUAGCCUCCGUUUUAGAGCUAGAAAUAG | 650 |
| | 18mer | ABE | CUCC | | CAAGUUAAAAUAAGGCUAGUCCGUUAUCAACUUGAAA | |
| | | | | | AAGUGGCACCGAGUCGGUGCUUUU | |
| Guide 424 | ?2M | CBE, | CGCGAGCACAGCUA | 556 | CGCGAGCACAGCUAAGGCCAGUUUUAGAGCUAGAAAU | 651 |
| | | ABE | AGGCCA | | AGCAAGUUAAAAUAAGGCUAGUCCGUUAUCAACUUGA | |
| | | | | | AAAAGUGGCACCGAGUCGGUGCUUUU | |
| Guide 425 | ß2M | CBE, | GAGUAGCGCGAGCA | 557 | GAGUAGCGCGAGCACAGCUAGUUUUAGAGCUAGAAAU | 652 |
| | | ABE | CAGCUA | | AGCAAGUUAAAAUAAGGCUAGUCCGUUAUCAACUUGA | |
| | | | | | AAAAGUGGCACCGAGUCGGUGCUUUU | |
| Guide 426 | ?2M | CBE, | GCUACUCUCUCUUU | 558 | GCUACUCUCUCUUUCUGGCCGUUUUAGAGCUAGAAAU | 653 |
| | | ABE | CUGGCC | | AGCAAGUUAAAAUAAGGCUAGUCCGUUAUCAACUUGA | |
| | | | | | AAAAGUGGCACCGAGUCGGUGCUUUU | |
| Guide 427 | ß2M | CBE | CGUGAGUAAACCUG | 559 | CGUGAGUAAACCUGAAUCUUGUUUUAGAGCUAGAAAU | 654 |
| | | | AAUCUU | | AGCAAGUUAAAAUAAGGCUAGUCCGUUAUCAACUUGA | |
| | | | | | AAAAGUGGCACCGAGUCGGUGCUUUU | |
| Guide 428 | ß2M | CBE, | UUUGACUUUCCAUU | 560 | UUUGACUUUCCAUUCUCUGCGUUUUAGAGCUAGAAAU | 655 |
| | | ABE | CUCUGC | | AGCAAGUUAAAAUAAGGCUAGUCCGUUAUCAACUUGA | |
| | | | | | AAAAGUGGCACCGAGUCGGUGCUUUU | |
| Guide 429 | ?2M | CBE, | ACCCAGACACAUAG | 561 | ACCCAGACACAUAGCAAUUCGUUUUAGAGCUAGAAAU | 656 |
| | | ABE | CAAUUC | | AGCAAGUUAAAAUAAGGCUAGUCCGUUAUCAACUUGA | |
| | | | | | AAAAGUGGCACCGAGUCGGUGCUUUU | |
| Guide 430 | ß2M | CBE, | AAGUCAACUUCAAU | 562 | AAGUCAACUUCAAUGUCGGAGUUUUAGAGCUAGAAAU | 657 |
| | | ABE | GUCGGA | | AGCAAGUUAAAAUAAGGCUAGUCCGUUAUCAACUUGA | |
| | | | | | AAAAGUGGCACCGAGUCGGUGCUUUU | |
| Guide 431 | ?2M | CBE, | CAGUAAGUCAACUU | 563 | CAGUAAGUCAACUUCAAUGUGUUUUAGAGCUAGAAAU | 658 |
| (b2m_629 | | ABE | CAAUGU | | AGCAAGUUAAAAUAAGGCUAGUCCGUUAUCAACUUGA | |
| - | | | | | AAAAGUGGCACCGAGUCGGUGCUUUU | |
| Guide 432 | ß2M | CBE, | GAAGUUGACUUACU | 564 | GAAGUUGACUUACUGAAGAAGUUUUAGAGCUAGAAAU | 659 |
| | | ABE | GAAGAA | | AGCAAGUUAAAAUAAGGCUAGUCCGUUAUCAACUUGA | |
| | | | | | AAAAGUGGCACCGAGUCGGUGCUUUU | |
| Guide 433 | ß2M | CBE, | UGGAGAGAGAAUUG | 565 | UGGAGAGAGAAUUGAAAAAGGUUUUAGAGCUAGAAAU | 660 |
| | | ABE | AAAAAG | | AGCAAGUUAAAAUAAGGCUAGUCCGUUAUCAACUUGA | |
| | | | | | AAAAGUGGCACCGAGUCGGUGCUUUU | |
| Guide 434 | ß2M | CBE, | UUCAGACUUGUCUU | 566 | UUCAGACUUGUCUUUCAGCAGUUUUAGAGCUAGAAAU | 661 |
| | | ABE | UCAGCA | | AGCAAGUUAAAAUAAGGCUAGUCCGUUAUCAACUUGA | |
| | | | | | AAAAGUGGCACCGAGUCGGUGCUUUU | |
| Guide 435 | ?2M | CBE, | ACUUGUCUUUCAGC | 567 | ACUUGUCUUUCAGCAAGGACGUUUUAGAGCUAGAAAU | 662 |
| | | ABE | AAGGAC | | AGCAAGUUAAAAUAAGGCUAGUCCGUUAUCAACUUGA | |
| | | | | | AAAAGUGGCACCGAGUCGGUGCUUUU | |
| Guide 436 | ?2M | CBE, | AUACUCAUCUUUUU | 568 | AUACUCAUCUUUUUCAGUGGGUUUUAGAGCUAGAAAU | 663 |
| | | ABE | CAGUGG | | AGCAAGUUAAAAUAAGGCUAGUCCGUUAUCAACUUGA | |
| | | | | | AAAAGUGGCACCGAGUCGGUGCUUUU | |
| Guide 437 | ß2M | CBE, | CAUACUCAUCUUUU | 569 | CAUACUCAUCUUUUUCAGUGGUUUUAGAGCUAGAAAU | 664 |
| | | ABE | UCAGUG | | AGCAAGUUAAAAUAAGGCUAGUCCGUUAUCAACUUGA | |
| | | | | | AAAAGUGGCACCGAGUCGGUGCUUUU | |
| Guide 438 | ß2M | CBE, | GCAUACUCAUCUUU | 570 | GCAUACUCAUCUUUUUCAGUGUUUUAGAGCUAGAAAU | 665 |
| | | ABE | UUCAGU | | AGCAAGUUAAAAUAAGGCUAGUCCGUUAUCAACUUGA | |
| | | | | | AAAAGUGGCACCGAGUCGGUGCUUUU | |
| Guide 439 | ?2M | CBE, | GGCAUACUCAUCUU | 571 | GGCAUACUCAUCUUUUUCAGGUUUUAGAGCUAGAAAU | 666 |
| | | ABE | UUUCAG | | AGCAAGUUAAAAUAAGGCUAGUCCGUUAUCAACUUGA | |
| | | | | | AAAAGUGGCACCGAGUCGGUGCUUUU | |
| Guide 440 | B2M | CBE, | AGUCACAUGGUUCA | 572 | AGUCACAUGGUUCACACGGCGUUUUAGAGCUAGAAAU | 667 |
| | | ABE | CACGGC | | AGCAAGUUAAAAUAAGGCUAGUCCGUUAUCAACUUGA | |
| | | | | | AAAAGUGGCACCGAGUCGGUGCUUUU | |
| Guide 441 | ß2M | CBE, | ACAAAGUCACAUGG | 573 | ACAAAGUCACAUGGUUCACAGUUUUAGAGCUAGAAAU | 668 |
| | | ABE | UUCACA | | AGCAAGUUAAAAUAAGGCUAGUCCGUUAUCAACUUGA | |
| | | | | | AAAAGUGGCACCGAGUCGGUGCUUUU | |
| Guide 442 | ß2M | CBE, | UGGGCUGUGACAAA | 574 | UGGGCUGUGACAAAGUCACAGUUUUAGAGCUAGAAAU | 669 |
| | | ABE | GUCACA | | AGCAAGUUAAAAUAAGGCUAGUCCGUUAUCAACUUGA | |
| | | | | | AAAAGUGGCACCGAGUCGGUGCUUUU | |
| TSBTx36 | CD48 | ABE | AAGCAUGUGCUCCA | 678 | AAGCAUGUGCUCCAGAGGUUGUUUUAGAGCUAGAAAU | 845 |
| 33 | | | GAGGUU | | AGCAAGUUAAAAUAAGGCUAGUCCGUUAUCAACUUGA | |
| | | | | | AAAAGUGGCACCGAGUCGGUGCUUUU | |
| TSBTx36 | CD48 | ABE | GAAGCAUGUGCUCC | 679 | GAAGCAUGUGCUCCAGAGGUGUUUUAGAGCUAGAAAU | 846 |
| 34 | | | AGAGGU | | AGCAAGUUAAAAUAAGGCUAGUCCGUUAUCAACUUGA | |
| | | | | | AAAAGUGGCACCGAGUCGGUGCUUUU | |
| TSBTx36 | CD48 | CBE | UUCUUACCCAGGGU | 680 | UUCUUACCCAGGGUACAGGGGUUUUAGAGCUAGAAAU | 847 |
| 35 | | | ACAGGG | | AGCAAGUUAAAAUAAGGCUAGUCCGUUAUCAACUUGA | |
| | | | | | AAAAGUGGCACCGAGUCGGUGCUUUU | |
| TSBTx36 | CD48 | ABE | UUCUUACCCAGGGU | 681 | UUCUUACCCAGGGUACAGGGGUUUUAGAGCUAGAAAU | 848 |
| 35 | | | ACAGGG | | AGCAAGUUAAAAUAAGGCUAGUCCGUUAUCAACUUGA | |
| | | | | | AAAAGUGGCACCGAGUCGGUGCUUUU | |
| TSBTx36 | CD48 | CBE | CGACCAGAAGAUUG | 682 | CGACCAGAAGAUUGUAGAAUGUUUUAGAGCUAGAAAU | 849 |
| 36 | | | UAGAAU | | AGCAAGUUAAAAUAAGGCUAGUCCGUUAUCAACUUGA | |
| | | | | | AAAAGUGGCACCGAGUCGGUGCUUUU | |
| TSBTx36 | CD48 | CBE | UCGACCAGAAGAUU | 683 | UCGACCAGAAGAUUGUAGAAGUUUUAGAGCUAGAAAU | 850 |
| 37 | | | GUAGAA | | AGCAAGUUAAAAUAAGGCUAGUCCGUUAUCAACUUGA | |
| | | | | | AAAAGUGGCACCGAGUCGGUGCUUUU | |
| TSBTx36 | CD48 | CBE | AAUCCCAUUCUACA | 684 | AAUCCCAUUCUACAAUCUUCGUUUUAGAGCUAGAAAU | 851 |
| 38 | | | AUCUUC | | AGCAAGUUAAAAUAAGGCUAGUCCGUUAUCAACUUGA | |
| | | | | | AAAAGUGGCACCGAGUCGGUGCUUUU | |
| TSBTx36 | CD48 | CBE | UGCAAUCCAUUCUA | 685 | UGCAAUCCAUUCUACUCCAAGUUUUAGAGCUAGAAAU | 852 |
| 39 | | | CUCCAA | | AGCAAGUUAAAAUAAGGCUAGUCCGUUAUCAACUUGA | |
| | | | | | AAAAGUGGCACCGAGUCGGUGCUUUU | |
| TSBTx36 | NLRC5 | ABE | GGUCCAUGAGGAGC | 686 | GGUCCAUGAGGAGCCAGCCCGUUUUAGAGCUAGAAAU | 853 |
| 40 | (CITA) | | CAGCCC | | AGCAAGUUAAAAUAAGGCUAGUCCGUUAUCAACUUGA | |
| | | | | | AAAAGUGGCACCGAGUCGGUGCUUUU | |
| TSBTx36 | NLRC5 | ABE | UGCAGGGUUCACCA | 687 | UGCAGGGUUCACCAGCCAGCGUUUUAGAGCUAGAAAU | 854 |
| 41 | (CITA) | | GCCAGC | | AGCAAGUUAAAAUAAGGCUAGUCCGUUAUCAACUUGA | |
| | | | | | AAAAGUGGCACCGAGUCGGUGCUUUU | |
| TSBTx36 | NLRC5 | CBE | CGAAAACUGCGAGG | 688 | CGAAAACUGCGAGGAGACCAGUUUUAGAGCUAGAAAU | 855 |
| 42 | (CITA) | | AGACCA | | AGCAAGUUAAAAUAAGGCUAGUCCGUUAUCAACUUGA | |
| | | | | | AAAAGUGGCACCGAGUCGGUGCUUUU | |
| TSBTx36 | NLRC5 | CBE | AGGCUGCAAGAUUG | 689 | AGGCUGCAAGAUUGUGGCAAGUUUUAGAGCUAGAAAU | 856 |
| 43 | (CITA) | | UGGCAA | | AGCAAGUUAAAAUAAGGCUAGUCCGUUAUCAACUUGA | |
| | | | | | AAAAGUGGCACCGAGUCGGUGCUUUU | |
| TSBTx36 | NLRC5 | ABE | UGCCAGAGCUCCAG | 690 | UGCCAGAGCUCCAGACCUGCGUUUUAGAGCUAGAAAU | 857 |
| 44 | (CITA) | | ACCUGC | | AGCAAGUUAAAAUAAGGCUAGUCCGUUAUCAACUUGA | |
| | | | | | AAAAGUGGCACCGAGUCGGUGCUUUU | |
| TSBTx36 | NLRC5 | CBE | AUACUCACUCCACU | 691 | AUACUCACUCCACUUCCUCCGUUUUAGAGCUAGAAAU | 858 |
| 45 | (CITA) | | UCCUCC | | AGCAAGUUAAAAUAAGGCUAGUCCGUUAUCAACUUGA | |
| | | | | | AAAAGUGGCACCGAGUCGGUGCUUUU | |
| TSBTx36 | NLRC5 | ABE | AUACUCACUCCACU | 692 | AUACUCACUCCACUUCCUCCGUUUUAGAGCUAGAAAU | 859 |
| 45 | (CITA) | | UCCUCC | | AGCAAGUUAAAAUAAGGCUAGUCCGUUAUCAACUUGA | |
| | | | | | AAAAGUGGCACCGAGUCGGUGCUUUU | |
| TSBTx36 | NLRC5 | CBE | AGGCUGUGGAGAGC | 693 | AGGCUGUGGAGAGCAGGAGAGUUUUAGAGCUAGAAAU | 860 |
| 46 | (CITA) | | AGGAGA | | AGCAAGUUAAAAUAAGGCUAGUCCGUUAUCAACUUGA | |
| | | | | | AAAAGUGGCACCGAGUCGGUGCUUUU | |
| TSBTx36 | NLRC5 | ABE | UCCACAGCCUCAGU | 694 | UCCACAGCCUCAGUAACAACGUUUUAGAGCUAGAAAU | 861 |
| 47 | (CITA) | | AACAAC | | AGCAAGUUAAAAUAAGGCUAGUCCGUUAUCAACUUGA | |
| | | | | | AAAAGUGGCACCGAGUCGGUGCUUUU | |
| TSBTx36 | NLRC5 | CBE | GCAGGCUGUGAAGA | 695 | GCAGGCUGUGAAGACAAAAGGUUUUAGAGCUAGAAAU | 862 |
| 48 | (CITA) | | CAAAAG | | AGCAAGUUAAAAUAAGGCUAGUCCGUUAUCAACUUGA | |
| | | | | | AAAAGUGGCACCGAGUCGGUGCUUUU | |
| TSBTx36 | NLRC5 | CBE | CAGGCUGUGAAGAC | 696 | CAGGCUGUGAAGACAAAAGAGUUUUAGAGCUAGAAAU | 863 |
| 49 | (CITA) | | AAAAGA | | AGCAAGUUAAAAUAAGGCUAGUCCGUUAUCAACUUGA | |
| | | | | | AAAAGUGGCACCGAGUCGGUGCUUUU | |
| TSBTx36 | NLRC5 | CBE | GCCCUGGAGGGACA | 697 | GCCCUGGAGGGACAUCACCAGUUUUAGAGCUAGAAAU | 864 |
| 50 | (CITA) | | UCACCA | | AGCAAGUUAAAAUAAGGCUAGUCCGUUAUCAACUUGA | |
| | | | | | AAAAGUGGCACCGAGUCGGUGCUUUU | |
| TSBTx36 | NLRC5 | ABE | CUGGGCAGGCUGAC | 698 | CUGGGCAGGCUGACACAUUGGUUUUAGAGCUAGAAAU | 865 |
| 51 | (CITA) | | ACAUUG | | AGCAAGUUAAAAUAAGGCUAGUCCGUUAUCAACUUGA | |
| | | | | | AAAAGUGGCACCGAGUCGGUGCUUUU | |
| TSBTx36 | NLRC5 | ABE | AUCUCCAGCCUCAG | 699 | AUCUCCAGCCUCAGUGAGAAGUUUUAGAGCUAGAAAU | 866 |
| 52 | (CITA) | | UGAGAA | | AGCAAGUUAAAAUAAGGCUAGUCCGUUAUCAACUUGA | |
| | | | | | AAAAGUGGCACCGAGUCGGUGCUUUU | |
| TSBTx36 | NLRC5 | CBE | ACUGAGGCUGGAGA | 700 | ACUGAGGCUGGAGAUCACAGGUUUUAGAGCUAGAAAU | 867 |
| 53 | (CITA) | | UCACAG | | AGCAAGUUAAAAUAAGGCUAGUCCGUUAUCAACUUGA | |
| | | | | | AAAAGUGGCACCGAGUCGGUGCUUUU | |
| TSBTx36 | NLRC5 | CBE | ACGCUCACCUGAUG | 701 | ACGCUCACCUGAUGUCCAAGGUUUUAGAGCUAGAAAU | 868 |
| 54 | (CITA) | | UCCAAG | | AGCAAGUUAAAAUAAGGCUAGUCCGUUAUCAACUUGA | |
| | | | | | AAAAGUGGCACCGAGUCGGUGCUUUU | |
| TSBTx36 | NLRC5 | ABE | ACGCUCACCUGAUG | 702 | ACGCUCACCUGAUGUCCAAGGUUUUAGAGCUAGAAAU | 869 |
| 54 | (CITA) | | UCCAAG | | AGCAAGUUAAAAUAAGGCUAGUCCGUUAUCAACUUGA | |
| | | | | | AAAAGUGGCACCGAGUCGGUGCUUUU | |
| TSBTx36 | NLRC5 | ABE | CCUAGGGAUAUGUG | 703 | CCUAGGGAUAUGUGGGCCACGUUUUAGAGCUAGAAAU | 870 |
| 55 | (CITA) | | GGCCAC | | AGCAAGUUAAAAUAAGGCUAGUCCGUUAUCAACUUGA | |
| | | | | | AAAAGUGGCACCGAGUCGGUGCUUUU | |
| TSBT×36 | NLRC5 | CBE | CUGAGGCUGCAAAG | 704 | CUGAGGCUGCAAAGGGGCAAGUUUUAGAGCUAGAAAU | 871 |
| 56 | (CITA) | | GGGCAA | | AGCAAGUUAAAAUAAGGCUAGUCCGUUAUCAACUUGA | |
| | | | | | AAAAGUGGCACCGAGUCGGUGCUUUU | |
| TSBTx36 | NLRC5 | CBE | GACAAUCUGUGAAA | 705 | GACAAUCUGUGAAACAAAGCGUUUUAGAGCUAGAAAU | 872 |
| 57 | (CITA) | | CAAAGC | | AGCAAGUUAAAAUAAGGCUAGUCCGUUAUCAACUUGA | |
| | | | | | AAAAGUGGCACCGAGUCGGUGCUUUU | |
| TSBTx36 | NLRC5 | ABE | CCUUUUCAGGCUGA | 706 | CCUUUUCAGGCUGAGCCAGAGUUUUAGAGCUAGAAAU | 873 |
| 58 | (CITA) | | GCCAGA | | AGCAAGUUAAAAUAAGGCUAGUCCGUUAUCAACUUGA | |
| | | | | | AAAAGUGGCACCGAGUCGGUGCUUUU | |
| TSBTx36 | NLRC5 | ABE | CUUUUCAGGCUGAG | 707 | CUUUUCAGGCUGAGCCAGACGUUUUAGAGCUAGAAAU | 874 |
| 59 | (CITA) | | CCAGAC | | AGCAAGUUAAAAUAAGGCUAGUCCGUUAUCAACUUGA | |
| | | | | | AAAAGUGGCACCGAGUCGGUGCUUUU | |
| TSBTx36 | NLRC5 | CBE | GACCUGGAUCAGAC | 708 | GACCUGGAUCAGACAGGACCGUUUUAGAGCUAGAAAU | 875 |
| 60 | (CITA) | | AGGACC | | AGCAAGUUAAAAUAAGGCUAGUCCGUUAUCAACUUGA | |
| | | | | | AAAAGUGGCACCGAGUCGGUGCUUUU | |
| TSBTx36 | NLRC5 | CBE | CAACUUACUCCACC | 709 | CAACUUACUCCACCUGGCUGGUUUUAGAGCUAGAAAU | 876 |
| 61 | (CITA) | | UGGCUG | | AGCAAGUUAAAAUAAGGCUAGUCCGUUAUCAACUUGA | |
| | | | | | AAAAGUGGCACCGAGUCGGUGCUUUU | |
| TSBT×36 | NLRC5 | ABE | CAACUUACUCCACC | 710 | CAACUUACUCCACCUGGCUGGUUUUAGAGCUAGAAAU | 877 |
| 61 | (CITA) | | UGGCUG | | AGCAAGUUAAAAUAAGGCUAGUCCGUUAUCAACUUGA | |
| | | | | | AAAAGUGGCACCGAGUCGGUGCUUUU | |
| TSBTx36 | NLRC5 | CBE | CUUACUUCACUGAG | 711 | CUUACUUCACUGAGGCCUCCGUUUUAGAGCUAGAAAU | 878 |
| 62 | (CITA) | | GCCUCC | | AGCAAGUUAAAAUAAGGCUAGUCCGUUAUCAACUUGA | |
| | | | | | AAAAGUGGCACCGAGUCGGUGCUUUU | |
| TSBTx36 | NLRC5 | ABE | CUUACUUCACUGAG | 712 | CUUACUUCACUGAGGCCUCCGUUUUAGAGCUAGAAAU | 879 |
| 62 | (CITA) | | GCCUCC | | AGCAAGUUAAAAUAAGGCUAGUCCGUUAUCAACUUGA | |
| | | | | | AAAAGUGGCACCGAGUCGGUGCUUUU | |
| TSBTx36 | TAPBP | CBE | GCUCACCCAAAGCC | 713 | GCUCACCCAAAGCCACAGCGGUUUUAGAGCUAGAAAU | 880 |
| 63 | (Tapasin) | | ACAGCG | | AGCAAGUUAAAAUAAGGCUAGUCCGUUAUCAACUUGA | |
| | | | | | AAAAGUGGCACCGAGUCGGUGCUUUU | |
| TSBTx36 | TAPBP | ABE | GCUCACCCAAAGCC | 714 | GCUCACCCAAAGCCACAGCGGUUUUAGAGCUAGAAAU | 881 |
| 63 | (Tapasin) | | ACAGCG | | AGCAAGUUAAAAUAAGGCUAGUCCGUUAUCAACUUGA | |
| | | | | | AAAAGUGGCACCGAGUCGGUGCUUUU | |
| TSBT×36 | TAPBP | CBE | GCUCUUACCUGCUA | 715 | GCUCUUACCUGCUACCUCCAGUUUUAGAGCUAGAAAU | 882 |
| 64 | (Tapasin) | | CCUCCA | | AGCAAGUUAAAAUAAGGCUAGUCCGUUAUCAACUUGA | |
| | | | | | AAAAGUGGCACCGAGUCGGUGCUUUU | |
| TSBTx36 | TAPBP | ABE | GCUCUUACCUGCUA | 716 | GCUCUUACCUGCUACCUCCAGUUUUAGAGCUAGAAAU | 883 |
| 64 | (Tapasin) | | CCUCCA | | AGCAAGUUAAAAUAAGGCUAGUCCGUUAUCAACUUGA | |
| | | | | | AAAAGUGGCACCGAGUCGGUGCUUUU | |
| TSBTx36 | TAPBP | CBE | AAAGACCUGGCAGG | 717 | AAAGACCUGGCAGGCAGAAGGUUUUAGAGCUAGAAAU | 884 |
| 65 | (Tapasin) | | CAGAAG | | AGCAAGUUAAAAUAAGGCUAGUCCGUUAUCAACUUGA | |
| | | | | | AAAAGUGGCACCGAGUCGGUGCUUUU | |
| TSBTx36 | TAPBP | CBE | GAACCAACACUCGA | 718 | GAACCAACACUCGAUCACCGGUUUUAGAGCUAGAAAU | 885 |
| 66 | (Tapasin) | | UCACCG | | AGCAAGUUAAAAUAAGGCUAGUCCGUUAUCAACUUGA | |
| | | | | | AAAAGUGGCACCGAGUCGGUGCUUUU | |
| TSBTx36 | TAPBP | CBE | GCUGGCCCAUUUCG | 719 | GCUGGCCCAUUUCGCAGAGGGUUUUAGAGCUAGAAAU | 886 |
| 67 | (Tapasin) | | CAGAGG | | AGCAAGUUAAAAUAAGGCUAGUCCGUUAUCAACUUGA | |
| | | | | | AAAAGUGGCACCGAGUCGGUGCUUUU | |
| TSBTx36 | TAPBP | CBE | CUGGCCCAUUUCGC | 720 | CUGGCCCAUUUCGCAGAGGCGUUUUAGAGCUAGAAAU | 887 |
| 68 | (Tapasin) | | AGAGGC | | AGCAAGUUAAAAUAAGGCUAGUCCGUUAUCAACUUGA | |
| | | | | | AAAAGUGGCACCGAGUCGGUGCUUUU | |
| TSBTx36 | TAPBP | CBE | ACCACAGCCAGAGC | 721 | ACCACAGCCAGAGCCUCAGCGUUUUAGAGCUAGAAAU | 888 |
| 69 | (Tapasin) | | CUCAGC | | AGCAAGUUAAAAUAAGGCUAGUCCGUUAUCAACUUGA | |
| | | | | | AAAAGUGGCACCGAGUCGGUGCUUUU | |
| TSBT×36 | TAPBP | CBE | ACUGGGACAAGAUG | 722 | ACUGGGACAAGAUGCUCUGCGUUUUAGAGCUAGAAAU | 889 |
| 70 | (Tapasin) | | CUCUGC | | AGCAAGUUAAAAUAAGGCUAGUCCGUUAUCAACUUGA | |
| | | | | | AAAAGUGGCACCGAGUCGGUGCUUUU | |
| TSBTx36 | TAPBP | CBE | CGUCGCCACUCUAG | 723 | CGUCGCCACUCUAGCCCAAAGUUUUAGAGCUAGAAAU | 890 |
| 71 | (Tapasin) | | CCCAAA | | AGCAAGUUAAAAUAAGGCUAGUCCGUUAUCAACUUGA | |
| | | | | | AAAAGUGGCACCGAGUCGGUGCUUUU | |
| TSBTx36 | TAPBP | CBE | GCGACGCCAGCACC | 724 | GCGACGCCAGCACCUGGGUAGUUUUAGAGCUAGAAAU | 891 |
| 72 | (Tapasin) | | UGGGUA | | AGCAAGUUAAAAUAAGGCUAGUCCGUUAUCAACUUGA | |
| | | | | | AAAAGUGGCACCGAGUCGGUGCUUUU | |
| TSBTx36 | TAPBP | CBE | CGACGCCAGCACCU | 725 | CGACGCCAGCACCUGGGUAAGUUUUAGAGCUAGAAAU | 892 |
| 73 | (Tapasin) | | GGGUAA | | AGCAAGUUAAAAUAAGGCUAGUCCGUUAUCAACUUGA | |
| | | | | | AAAAGUGGCACCGAGUCGGUGCUUUU | |
| TSBT×36 | TAPBP | CBE | AUCCCAAGCAGCAA | 726 | AUCCCAAGCAGCAAAUGCCAGUUUUAGAGCUAGAAAU | 893 |
| 74 | (Tapasin) | | AUGCCA | | AGCAAGUUAAAAUAAGGCUAGUCCGUUAUCAACUUGA | |
| | | | | | AAAAGUGGCACCGAGUCGGUGCUUUU | |
| TSBTx36 | TAPBP | CBE | ACAGUUCAACCCUU | 727 | ACAGUUCAACCCUUUCAGGAGUUUUAGAGCUAGAAAU | 894 |
| 75 | (Tapasin) | | UCAGGA | | AGCAAGUUAAAAUAAGGCUAGUCCGUUAUCAACUUGA | |
| | | | | | AAAAGUGGCACCGAGUCGGUGCUUUU | |
| TSBTx36 | TAPBP | CBE | CUUUCAGGAGGGCA | 728 | CUUUCAGGAGGGCACCUAUCGUUUUAGAGCUAGAAAU | 895 |
| 76 | (Tapasin) | | CCUAUC | | AGCAAGUUAAAAUAAGGCUAGUCCGUUAUCAACUUGA | |
| | | | | | AAAAGUGGCACCGAGUCGGUGCUUUU | |
| TSBTx36 | TAPBP | CBE | CCUGCAAGGACAGG | 729 | CCUGCAAGGACAGGUCACCCGUUUUAGAGCUAGAAAU | 896 |
| 77 | (Tapasin) | | UCACCC | | AGCAAGUUAAAAUAAGGCUAGUCCGUUAUCAACUUGA | |
| | | | | | AAAAGUGGCACCGAGUCGGUGCUUUU | |
| TSBTx36 | TAPBP | CBE | CGAGAGCCACCUCU | 730 | CGAGAGCCACCUCUGCCCCUGUUUUAGAGCUAGAAAU | 897 |
| 78 | (Tapasin) | | GCCCCU | | AGCAAGUUAAAAUAAGGCUAGUCCGUUAUCAACUUGA | |
| | | | | | AAAAGUGGCACCGAGUCGGUGCUUUU | |
| TSBTx36 | CD155 | ABE | AACUGGCAUGGCCC | 731 | AACUGGCAUGGCCCGAGCCAGUUUUAGAGCUAGAAAU | 898 |
| 79 | | | GAGCCA | | AGCAAGUUAAAAUAAGGCUAGUCCGUUAUCAACUUGA | |
| | | | | | AAAAGUGGCACCGAGUCGGUGCUUUU | |
| TSBTx36 | CD155 | CBE | CACUCACCGGUUCC | 732 | CACUCACCGGUUCCUGGGGGGUUUUAGAGCUAGAAAU | 899 |
| 80 | | | UGGGGG | | AGCAAGUUAAAAUAAGGCUAGUCCGUUAUCAACUUGA | |
| | | | | | AAAAGUGGCACCGAGUCGGUGCUUUU | |
| TSBTx36 | CD155 | ABE | CACUCACCGGUUCC | 733 | CACUCACCGGUUCCUGGGGGGUUUUAGAGCUAGAAAU | 900 |
| 80 | | | UGGGGG | | AGCAAGUUAAAAUAAGGCUAGUCCGUUAUCAACUUGA | |
| | | | | | AAAAGUGGCACCGAGUCGGUGCUUUU | |
| TSBT×36 | CD155 | ABE | CGCAGGGGACGUCG | 734 | CGCAGGGGACGUCGUCGUGCGUUUUAGAGCUAGAAAU | 901 |
| 81 | | | UCGUGC | | AGCAAGUUAAAAUAAGGCUAGUCCGUUAUCAACUUGA | |
| | | | | | AAAAGUGGCACCGAGUCGGUGCUUUU | |
| TSBTx36 | CD155 | CBE | CACACUCACAGUAC | 735 | CACACUCACAGUACACGGUGGUUUUAGAGCUAGAAAU | 902 |
| 82 | | | ACGGUG | | AGCAAGUUAAAAUAAGGCUAGUCCGUUAUCAACUUGA | |
| | | | | | AAAAGUGGCACCGAGUCGGUGCUUUU | |
| TSBTx36 | CD155 | ABE | CACACUCACAGUAC | 736 | CACACUCACAGUACACGGUGGUUUUAGAGCUAGAAAU | 903 |
| 82 | | | ACGGUG | | AGCAAGUUAAAAUAAGGCUAGUCCGUUAUCAACUUGA | |
| | | | | | AAAAGUGGCACCGAGUCGGUGCUUUU | |
| TSBTx36 | CD155 | CBE | UGGUCCUGGGAGAG | 737 | UGGUCCUGGGAGAGACAGAAGUUUUAGAGCUAGAAAU | 904 |
| 83 | | | ACAGAA | | AGCAAGUUAAAAUAAGGCUAGUCCGUUAUCAACUUGA | |
| | | | | | AAAAGUGGCACCGAGUCGGUGCUUUU | |
| TSBTx36 | CD155 | CBE | UUCCUCACCUUUGA | 738 | UUCCUCACCUUUGACCUGGAGUUUUAGAGCUAGAAAU | 905 |
| 84 | | | CCUGGA | | AGCAAGUUAAAAUAAGGCUAGUCCGUUAUCAACUUGA | |
| | | | | | AAAAGUGGCACCGAGUCGGUGCUUUU | |
| TSBTx36 | CD155 | ABE | UUCCUCACCUUUGA | 739 | UUCCUCACCUUUGACCUGGAGUUUUAGAGCUAGAAAU | 906 |
| 84 | | | CCUGGA | | AGCAAGUUAAAAUAAGGCUAGUCCGUUAUCAACUUGA | |
| | | | | | AAAAGUGGCACCGAGUCGGUGCUUUU | |
| TSBTx36 | CD155 | CBE | CCUACAGGUGCCCA | 740 | CCUACAGGUGCCCAACAUGGGUUUUAGAGCUAGAAAU | 907 |
| 85 | | | ACAUGG | | AGCAAGUUAAAAUAAGGCUAGUCCGUUAUCAACUUGA | |
| | | | | | AAAAGUGGCACCGAGUCGGUGCUUUU | |
| TSBTx36 | CD155 | CBE | UGUCACAGCUGACU | 741 | UGUCACAGCUGACUUGGGCGGUUUUAGAGCUAGAAAU | 908 |
| 86 | | | UGGGCG | | AGCAAGUUAAAAUAAGGCUAGUCCGUUAUCAACUUGA | |
| | | | | | AAAAGUGGCACCGAGUCGGUGCUUUU | |
| TSBTx36 | CD155 | CBE | AACGCAGGGCCCCA | 742 | AACGCAGGGCCCCAGCUAUUGUUUUAGAGCUAGAAAU | 909 |
| 87 | | | GCUAUU | | AGCAAGUUAAAAUAAGGCUAGUCCGUUAUCAACUUGA | |
| | | | | | AAAAGUGGCACCGAGUCGGUGCUUUU | |
| TSBTx36 | CD155 | CBE | CCCGCAGGGCAGCA | 743 | CCCGCAGGGCAGCAGGAGCGGUUUUAGAGCUAGAAAU | 910 |
| 88 | | | GGAGCG | | AGCAAGUUAAAAUAAGGCUAGUCCGUUAUCAACUUGA | |
| | | | | | AAAAGUGGCACCGAGUCGGUGCUUUU | |
| TSBTx36 | CD155 | CBE | GAGUGCCAGGUGAU | 744 | GAGUGCCAGGUGAUUUGGGCGUUUUAGAGCUAGAAAU | 911 |
| 89 | | | UUGGGC | | AGCAAGUUAAAAUAAGGCUAGUCCGUUAUCAACUUGA | |
| | | | | | AAAAGUGGCACCGAGUCGGUGCUUUU | |
| TSBT×36 | MICA | ABE | CGGGGCCAUGGGGC | 745 | CGGGGCCAUGGGGCUGGGCCGUUUUAGAGCUAGAAAU | 912 |
| 90 | | | UGGGCC | | AGCAAGUUAAAAUAAGGCUAGUCCGUUAUCAACUUGA | |
| | | | | | AAAAGUGGCACCGAGUCGGUGCUUUU | |
| TSBTx36 | MICA | CBE | UCACCAGCAGCAGC | 746 | UCACCAGCAGCAGCUCCCGGGUUUUAGAGCUAGAAAU | 913 |
| 91 | | | UCCCGG | | AGCAAGUUAAAAUAAGGCUAGUCCGUUAUCAACUUGA | |
| | | | | | AAAAGUGGCACCGAGUCGGUGCUUUU | |
| TSBTx36 | MICA | ABE | UCACCAGCAGCAGC | 747 | UCACCAGCAGCAGCUCCCGGGUUUUAGAGCUAGAAAU | 914 |
| 91 | | | UCCCGG | | AGCAAGUUAAAAUAAGGCUAGUCCGUUAUCAACUUGA | |
| | | | | | AAAAGUGGCACCGAGUCGGUGCUUUU | |
| TSBTx36 | MICA | CBE | CACUCACCAGCAGC | 748 | CACUCACCAGCAGCAGCUCCGUUUUAGAGCUAGAAAU | 915 |
| 92 | | | AGCUCC | | AGCAAGUUAAAAUAAGGCUAGUCCGUUAUCAACUUGA | |
| | | | | | AAAAGUGGCACCGAGUCGGUGCUUUU | |
| TSBTx36 | MICA | ABE | CACUCACCAGCAGC | 749 | CACUCACCAGCAGCAGCUCCGUUUUAGAGCUAGAAAU | 916 |
| 92 | | | AGCUCC | | AGCAAGUUAAAAUAAGGCUAGUCCGUUAUCAACUUGA | |
| | | | | | AAAAGUGGCACCGAGUCGGUGCUUUU | |
| TSBTx36 | MICA | ABE | GGCAGGCUUGCAUU | 750 | GGCAGGCUUGCAUUCCCUCCGUUUUAGAGCUAGAAAU | 917 |
| 93 | | | CCCUCC | | AGCAAGUUAAAAUAAGGCUAGUCCGUUAUCAACUUGA | |
| | | | | | AAAAGUGGCACCGAGUCGGUGCUUUU | |
| TSBTx36 | MICB | ABE | GGCAGGCUUGCAUU | 751 | GGCAGGCUUGCAUUCCCUCCGUUUUAGAGCUAGAAAU | 918 |
| 93 | | | CCCUCC | | AGCAAGUUAAAAUAAGGCUAGUCCGUUAUCAACUUGA | |
| | | | | | AAAAGUGGCACCGAGUCGGUGCUUUU | |
| TSBTx36 | MICA | CBE | CGUCGGUACCUGUU | 752 | CGUCGGUACCUGUUCUCCUCGUUUUAGAGCUAGAAAU | 919 |
| 94 | | | CUCCUC | | AGCAAGUUAAAAUAAGGCUAGUCCGUUAUCAACUUGA | |
| | | | | | AAAAGUGGCACCGAGUCGGUGCUUUU | |
| TSBTx36 | MICA | ABE | CGUCGGUACCUGUU | 753 | CGUCGGUACCUGUUCUCCUCGUUUUAGAGCUAGAAAU | 920 |
| 94 | | | CUCCUC | | AGCAAGUUAAAAUAAGGCUAGUCCGUUAUCAACUUGA | |
| | | | | | AAAAGUGGCACCGAGUCGGUGCUUUU | |
| TSBT×36 | MICA | ABE | UUCUUCUCCAGUGC | 754 | UUCUUCUCCAGUGCCCCCCAGUUUUAGAGCUAGAAAU | 921 |
| 95 | | | CCCCCA | | AGCAAGUUAAAAUAAGGCUAGUCCGUUAUCAACUUGA | |
| | | | | | AAAAGUGGCACCGAGUCGGUGCUUUU | |
| TSBTx36 | MICA | CBE | UAGGCUCACCAGAG | 755 | UAGGCUCACCAGAGGGCACAGUUUUAGAGCUAGAAAU | 922 |
| 96 | | | GGCACA | | AGCAAGUUAAAAUAAGGCUAGUCCGUUAUCAACUUGA | |
| | | | | | AAAAGUGGCACCGAGUCGGUGCUUUU | |
| TSBTx36 | MICA | ABE | UAGGCUCACCAGAG | 756 | UAGGCUCACCAGAGGGCACAGUUUUAGAGCUAGAAAU | 923 |
| 96 | | | GGCACA | | AGCAAGUUAAAAUAAGGCUAGUCCGUUAUCAACUUGA | |
| | | | | | AAAAGUGGCACCGAGUCGGUGCUUUU | |
| TSBTx36 | MICA | CBE | CUGUCCAUUCCUCA | 757 | CUGUCCAUUCCUCAGUCUCCGUUUUAGAGCUAGAAAU | 924 |
| 97 | | | GUCUCC | | AGCAAGUUAAAAUAAGGCUAGUCCGUUAUCAACUUGA | |
| | | | | | AAAAGUGGCACCGAGUCGGUGCUUUU | |
| TSBTx36 | MICA | CBE | UGUCCCAUGUCUUA | 758 | UGUCCCAUGUCUUAUUUCCCGUUUUAGAGCUAGAAAU | 925 |
| 98 | | | UUUCCC | | AGCAAGUUAAAAUAAGGCUAGUCCGUUAUCAACUUGA | |
| | | | | | AAAAGUGGCACCGAGUCGGUGCUUUU | |
| TSBTx36 | MICA | CBE | CCCGCCUUCUAAAU | 759 | CCCGCCUUCUAAAUCUCCCCGUUUUAGAGCUAGAAAU | 926 |
| 99 | | | CUCCCC | | AGCAAGUUAAAAUAAGGCUAGUCCGUUAUCAACUUGA | |
| | | | | | AAAAGUGGCACCGAGUCGGUGCUUUU | |
| TSBTx37 | MICA | ABE | GGAAUUUUCUCUUC | 760 | GGAAUUUUCUCUUCCAAGCGGUUUUAGAGCUAGAAAU | 927 |
| 00 | | | CAAGCG | | AGCAAGUUAAAAUAAGGCUAGUCCGUUAUCAACUUGA | |
| | | | | | AAAAGUGGCACCGAGUCGGUGCUUUU | |
| TSBTx37 | MICA | ABE | AAGAGAAAAUUCCA | 761 | AAGAGAAAAUUCCAGUGGGCGUUUUAGAGCUAGAAAU | 928 |
| 01 | | | GUGGGC | | AGCAAGUUAAAAUAAGGCUAGUCCGUUAUCAACUUGA | |
| | | | | | AAAAGUGGCACCGAGUCGGUGCUUUU | |
| TSBTx37 | MICA | CBE | GGAGAGGGCGGGGC | 762 | GGAGAGGGGGGGGCCACGCUGUUUUAGAGCUAGAAAU | 929 |
| 02 | | | CACGCU | | AGCAAGUUAAAAUAAGGCUAGUCCGUUAUCAACUUGA | |
| | | | | | AAAAGUGGCACCGAGUCGGUGCUUUU | |
| TSBTx37 | MICA | CBE | CCGCCCUCUCCGCU | 763 | CCGCCCUCUCCGCUCGUGAUGUUUUAGAGCUAGAAAU | 930 |
| 03 | | | CGUGAU | | AGCAAGUUAAAAUAAGGCUAGUCCGUUAUCAACUUGA | |
| | | | | | AAAAGUGGCACCGAGUCGGUGCUUUU | |
| TSBTx37 | MICA | CBE | AGGGCCAAUCACGA | 764 | AGGGCCAAUCACGAGCGGAGGUUUUAGAGCUAGAAAU | 931 |
| 04 | | | GCGGAG | | AGCAAGUUAAAAUAAGGCUAGUCCGUUAUCAACUUGA | |
| | | | | | AAAAGUGGCACCGAGUCGGUGCUUUU | |
| TSBTx37 | MICA | ABE | UCGUGAUUGGCCCU | 765 | UCGUGAUUGGCCCUAAGUUCGUUUUAGAGCUAGAAAU | 932 |
| 05 | | | AAGUUC | | AGCAAGUUAAAAUAAGGCUAGUCCGUUAUCAACUUGA | |
| | | | | | AAAAGUGGCACCGAGUCGGUGCUUUU | |
| TSBTx37 | MICB | ABE | AGGGGCCAUGGGGC | 766 | AGGGGCCAUGGGGCUGGGCCGUUUUAGAGCUAGAAAU | 933 |
| 06 | | | UGGGCC | | AGCAAGUUAAAAUAAGGCUAGUCCGUUAUCAACUUGA | |
| | | | | | AAAAGUGGCACCGAGUCGGUGCUUUU | |
| TSBTx37 | MICB | CBE | ACUCACCAGCGGCG | 767 | ACUCACCAGCGGCGGCUGCCGUUUUAGAGCUAGAAAU | 934 |
| 07 | | | GCUGCC | | AGCAAGUUAAAAUAAGGCUAGUCCGUUAUCAACUUGA | |
| | | | | | AAAAGUGGCACCGAGUCGGUGCUUUU | |
| TSBTx37 | MICB | ABE | ACUCACCAGCGGCG | 768 | ACUCACCAGCGGCGGCUGCCGUUUUAGAGCUAGAAAU | 935 |
| 07 | | | GCUGCC | | AGCAAGUUAAAAUAAGGCUAGUCCGUUAUCAACUUGA | |
| | | | | | AAAAGUGGCACCGAGUCGGUGCUUUU | |
| TSBTx37 | MICB | CBE | CUCACCAGCGGCGG | 769 | CUCACCAGCGGCGGCUGCCGGUUUUAGAGCUAGAAAU | 936 |
| 08 | | | CUGCCG | | AGCAAGUUAAAAUAAGGCUAGUCCGUUAUCAACUUGA | |
| | | | | | AAAAGUGGCACCGAGUCGGUGCUUUU | |
| TSBTx37 | MICB | ABE | CUCACCAGCGGCGG | 770 | CUCACCAGCGGCGGCUGCCGGUUUUAGAGCUAGAAAU | 937 |
| 08 | | | CUGCCG | | AGCAAGUUAAAAUAAGGCUAGUCCGUUAUCAACUUGA | |
| | | | | | AAAAGUGGCACCGAGUCGGUGCUUUU | |
| TSBTx37 | MICB | CBE | CACUCACCAGCGGC | 771 | CACUCACCAGCGGCGGCUGCGUUUUAGAGCUAGAAAU | 938 |
| 09 | | | GGCUGC | | AGCAAGUUAAAAUAAGGCUAGUCCGUUAUCAACUUGA | |
| | | | | | AAAAGUGGCACCGAGUCGGUGCUUUU | |
| TSBTx37 | MICB | ABE | CACUCACCAGCGGC | 772 | CACUCACCAGCGGCGGCUGCGUUUUAGAGCUAGAAAU | 939 |
| 09 | | | GGCUGC | | AGCAAGUUAAAAUAAGGCUAGUCCGUUAUCAACUUGA | |
| | | | | | AAAAGUGGCACCGAGUCGGUGCUUUU | |
| TSBTx37 | MICB | CBE | CUACAGCGAUAUCU | 773 | CUACAGCGAUAUCUGAAAUCGUUUUAGAGCUAGAAAU | 940 |
| 10 | | | GAAAUC | | AGCAAGUUAAAAUAAGGCUAGUCCGUUAUCAACUUGA | |
| | | | | | AAAAGUGGCACCGAGUCGGUGCUUUU | |
| TSBTx37 | MICB | CBE | GUCGGUACCUGUUC | 774 | GUCGGUACCUGUUCUCCUGAGUUUUAGAGCUAGAAAU | 941 |
| 11 | | | UCCUGA | | AGCAAGUUAAAAUAAGGCUAGUCCGUUAUCAACUUGA | |
| | | | | | AAAAGUGGCACCGAGUCGGUGCUUUU | |
| TSBTx37 | MICB | ABE | GUCGGUACCUGUUC | 775 | GUCGGUACCUGUUCUCCUGAGUUUUAGAGCUAGAAAU | 942 |
| 11 | | | UCCUGA | | AGCAAGUUAAAAUAAGGCUAGUCCGUUAUCAACUUGA | |
| | | | | | AAAAGUGGCACCGAGUCGGUGCUUUU | |
| TSBTx37 | MICB | CBE | CAGGCUCACCAGAG | 776 | CAGGCUCACCAGAGGGCACAGUUUUAGAGCUAGAAAU | 943 |
| 12 | | | GGCACA | | AGCAAGUUAAAAUAAGGCUAGUCCGUUAUCAACUUGA | |
| | | | | | AAAAGUGGCACCGAGUCGGUGCUUUU | |
| TSBTx37 | MICB | ABE | CAGGCUCACCAGAG | 777 | CAGGCUCACCAGAGGGCACAGUUUUAGAGCUAGAAAU | 944 |
| 12 | | | GGCACA | | AGCAAGUUAAAAUAAGGCUAGUCCGUUAUCAACUUGA | |
| | | | | | AAAAGUGGCACCGAGUCGGUGCUUUU | |
| TSBTx37 | PDIA3 | CBE | GAGGCGCAUGGCGG | 778 | GAGGCGCAUGGCGGCGAGGUGUUUUAGAGCUAGAAAU | 945 |
| 24 | (ERp57) | | CGAGGU | | AGCAAGUUAAAAUAAGGCUAGUCCGUUAUCAACUUGA | |
| | | | | | AAAAGUGGCACCGAGUCGGUGCUUUU | |
| TSBTx37 | PDIA3 | ABE | GAGGCGCAUGGCGG | 779 | GAGGCGCAUGGCGGCGAGGUGUUUUAGAGCUAGAAAU | 946 |
| 24 | (ERp57) | | CGAGGU | | AGCAAGUUAAAAUAAGGCUAGUCCGUUAUCAACUUGA | |
| | | | | | AAAAGUGGCACCGAGUCGGUGCUUUU | |
| TSBTx37 | PDIA3 | CBE | CGCAUGGCGGCGAG | 780 | CGCAUGGCGGCGAGGUGGGGGUUUUAGAGCUAGAAAU | 947 |
| 25 | (ERp57) | | GUGGGG | | AGCAAGUUAAAAUAAGGCUAGUCCGUUAUCAACUUGA | |
| | | | | | AAAAGUGGCACCGAGUCGGUGCUUUU | |
| TSBTx37 | PDIA3 | ABE | CGCAUGGCGGCGAG | 781 | CGCAUGGCGGCGAGGUGGGGGUUUUAGAGCUAGAAAU | 948 |
| 25 | (ERp57) | | GUGGGG | | AGCAAGUUAAAAUAAGGCUAGUCCGUUAUCAACUUGA | |
| | | | | | AAAAGUGGCACCGAGUCGGUGCUUUU | |
| TSBTx37 | PDIA3 | CBE | AGGCGCAUGGCGGC | 782 | AGGCGCAUGGCGGCGAGGUGGUUUUAGAGCUAGAAAU | 949 |
| 26 | (ERp57) | | GAGGUG | | AGCAAGUUAAAAUAAGGCUAGUCCGUUAUCAACUUGA | |
| | | | | | AAAAGUGGCACCGAGUCGGUGCUUUU | |
| TSBTx37 | PDIA3 | ABE | AGGCGCAUGGCGGC | 783 | AGGCGCAUGGCGGCGAGGUGGUUUUAGAGCUAGAAAU | 950 |
| 26 | (ERp57) | | GAGGUG | | AGCAAGUUAAAAUAAGGCUAGUCCGUUAUCAACUUGA | |
| | | | | | AAAAGUGGCACCGAGUCGGUGCUUUU | |
| TSBTx37 | PDIA3 | ABE | UUCCCACAGGGUAA | 784 | UUCCCACAGGGUAAUGAUGGGUUUUAGAGCUAGAAAU | 951 |
| 27 | (ERp57) | | UGAUGG | | AGCAAGUUAAAAUAAGGCUAGUCCGUUAUCAACUUGA | |
| | | | | | AAAAGUGGCACCGAGUCGGUGCUUUU | |
| TSBTx37 | PDIA3 | CBE | ACGCCUACAAUUGG | 785 | ACGCCUACAAUUGGAAAACAGUUUUAGAGCUAGAAAU | 952 |
| 28 | (ERp57) | | AAAACA | | AGCAAGUUAAAAUAAGGCUAGUCCGUUAUCAACUUGA | |
| | | | | | AAAAGUGGCACCGAGUCGGUGCUUUU | |
| TSBTx37 | PDIA3 | CBE | CGCCUACAAUUGGA | 786 | CGCCUACAAUUGGAAAACAAGUUUUAGAGCUAGAAAU | 953 |
| 29 | (ERp57) | | AAACAA | | AGCAAGUUAAAAUAAGGCUAGUCCGUUAUCAACUUGA | |
| | | | | | AAAAGUGGCACCGAGUCGGUGCUUUU | |
| TSBTx37 | PDIA3 | ABE | CAAUUGUAGGCGUG | 787 | CAAUUGUAGGCGUGAUGGGAGUUUUAGAGCUAGAAAU | 954 |
| 30 | (ERp57) | | AUGGGA | | AGCAAGUUAAAAUAAGGCUAGUCCGUUAUCAACUUGA | |
| | | | | | AAAAGUGGCACCGAGUCGGUGCUUUU | |
| TSBTx37 | PDIA3 | CBE | UGCUGAGCUGUUAA | 788 | UGCUGAGCUGUUAAUAAAACGUUUUAGAGCUAGAAAU | 955 |
| 31 | (ERp57) | | UAAAAC | | AGCAAGUUAAAAUAAGGCUAGUCCGUUAUCAACUUGA | |
| | | | | | AAAAGUGGCACCGAGUCGGUGCUUUU | |
| TSBTx37 | PDIA3 | CBE | ACUUACCCUCUGAC | 789 | ACUUACCCUCUGACUUCAUAGUUUUAGAGCUAGAAAU | 956 |
| 32 | (ERp57) | | UUCAUA | | AGCAAGUUAAAAUAAGGCUAGUCCGUUAUCAACUUGA | |
| | | | | | AAAAGUGGCACCGAGUCGGUGCUUUU | |
| TSBTx37 | PDIA3 | ABE | ACUUACCCUCUGAC | 790 | ACUUACCCUCUGACUUCAUAGUUUUAGAGCUAGAAAU | 957 |
| 32 | (ERp57) | | UUCAUA | | AGCAAGUUAAAAUAAGGCUAGUCCGUUAUCAACUUGA | |
| | | | | | AAAAGUGGCACCGAGUCGGUGCUUUU | |
| TSBTx37 | PDIA3 | CBE | UCACUUACUUCAUA | 791 | UCACUUACUUCAUAUUUCUUGUUUUAGAGCUAGAAAU | 958 |
| 33 | (ERp57) | | UUUCUU | | AGCAAGUUAAAAUAAGGCUAGUCCGUUAUCAACUUGA | |
| | | | | | AAAAGUGGCACCGAGUCGGUGCUUUU | |
| TSBTx37 | PDIA3 | ABE | UCACUUACUUCAUA | 792 | UCACUUACUUCAUAUUUCUUGUUUUAGAGCUAGAAAU | 959 |
| 33 | (ERp57) | | UUUCUU | | AGCAAGUUAAAAUAAGGCUAGUCCGUUAUCAACUUGA | |
| | | | | | AAAAGUGGCACCGAGUCGGUGCUUUU | |
| TSBTx39 | TAP1 | Cas12b | CAUUCUUUACGGGC | 793 | GUUCUGUCUUUUGGUCAGGACAACCGUCUAGCUAUAA | 960 |
| 23 | | | CGCCUCAC | | GUGCUGCAGGGUGUGAGAAACUCCUAUUGCUGGACGA | |
| | | | | | UGUCUCUUACGAGGCAUUAGCACCAUUCUUUACGGGC | |
| | | | | | CGCCUCAC | |
| TSBTx39 | TAP1 | Cas12b | UUUACGGGCCGCCU | 794 | GUUCUGUCUUUUGGUCAGGACAACCGUCUAGCUAUAA | 961 |
| 24 | | | CACUGACU | | GUGCUGCAGGGUGUGAGAAACUCCUAUUGCUGGACGA | |
| | | | | | UGUCUCUUACGAGGCAUUAGCACUUUACGGGCCGCCU | |
| | | | | | CACUGACU | |
| TSBTx39 | TAP1 | Cas12b | UACAAGAUGGCUCA | 795 | GUUCUGUCUUUUGGUCAGGACAACCGUCUAGCUAUAA | 962 |
| 25 | | | GCCGAUAC | | GUGCUGCAGGGUGUGAGAAACUCCUAUUGCUGGACGA | |
| | | | | | UGUCUCUUACGAGGCAUUAGCACUACAAGAUGGCUCA | |
| | | | | | GCCGAUAC | |
| TSBTx39 | TAPI | Cas12b | UCACCAUAGCCAGG | 796 | GUUCUGUCUUUUGGUCAGGACAACCGUCUAGCUAUAA | 963 |
| 26 | | | UCUGGGGG | | GUGCUGCAGGGUGUGAGAAACUCCUAUUGCUGGACGA | |
| | | | | | UGUCUCUUACGAGGCAUUAGCACUCACCAUAGCCAGG | |
| | | | | | UCUGGGGG | |
| TSBTx39 | TAP1 | Cas12b | UCUGAGUGAGAAUC | 797 | GUUCUGUCUUUUGGUCAGGACAACCGUCUAGCUAUAA | 964 |
| 27 | | | UGAGCUUA | | GUGCUGCAGGGUGUGAGAAACUCCUAUUGCUGGACGA | |
| | | | | | UGUCUCUUACGAGGCAUUAGCACUCUGAGUGAGAAUC | |
| | | | | | UGAGCUUA | |
| TSBTx39 | TAP1 | Cas12b | UCACUCAGAGAAUC | 798 | GUUCUGUCUUUUGGUCAGGACAACCGUCUAGCUAUAA | 965 |
| 28 | | | ACUCAGGG | | GUGCUGCAGGGUGUGAGAAACUCCUAUUGCUGGACGA | |
| | | | | | UGUCUCUUACGAGGCAUUAGCACUCACUCAGAGAAUC | |
| | | | | | ACUCAGGG | |
| TSBTx39 | TAP1 | Cas12b | CUGUGGUACCUGGU | 799 | GUUCUGUCUUUUGGUCAGGACAACCGUCUAGCUAUAA | 966 |
| 29 | | | GCGAGGCC | | GUGCUGCAGGGUGUGAGAAACUCCUAUUGCUGGACGA | |
| | | | | | UGUCUCUUACGAGGCAUUAGCACCUGUGGUACCUGGU | |
| | | | | | GCGAGGCC | |
| TSBTx39 | TAP1 | Cas12b | UCCCACCUUCUUGG | 800 | GUUCUGUCUUUUGGUCAGGACAACCGUCUAGCUAUAA | 967 |
| 30 | | | GCAGAAGG | | GUGCUGCAGGGUGUGAGAAACUCCUAUUGCUGGACGA | |
| | | | | | UGUCUCUUACGAGGCAUUAGCACUCCCACCUUCUUGG | |
| | | | | | GCAGAAGG | |
| TSBTx39 | TAP1 | Cas12b | CCGCACCUGCACUU | 801 | GUUCUGUCUUUUGGUCAGGACAACCGUCUAGCUAUAA | 968 |
| 31 | | | CCAGCAAC | | GUGCUGCAGGGUGUGAGAAACUCCUAUUGCUGGACGA | |
| | | | | | UGUCUCUUACGAGGCAUUAGCACCCGCACCUGCACUU | |
| | | | | | CCAGCAAC | |
| TSBTx39 | TAP1 | Cas12b | AGGCUCUGUCGGCC | 802 | GUUCUGUCUUUUGGUCAGGACAACCGUCUAGCUAUAA | 969 |
| 32 | | | AUGCCUAC | | GUGCUGCAGGGUGUGAGAAACUCCUAUUGCUGGACGA | |
| | | | | | UGUCUCUUACGAGGCAUUAGCACAGGCUCUGUCGGCC | |
| | | | | | AUGCCUAC | |
| TSBTx39 | TAP2 | Cas12b | GUGGGGACACUGCU | 803 | GUUCUGUCUUUUGGUCAGGACAACCGUCUAGCUAUAA | 970 |
| 33 | | | GCUCCCGC | | GUGCUGCAGGGUGUGAGAAACUCCUAUUGCUGGACGA | |
| | | | | | UGUCUCUUACGAGGCAUUAGCACGUGGGGACACUGCU | |
| | | | | | GCUCCCGC | |
| TSBTx39 | TAP2 | Cas12b | AUCCCUCACUAUUC | 804 | GUUCUGUCUUUUGGUCAGGACAACCGUCUAGCUAUAA | 971 |
| 34 | | | UGGUCGUG | | GUGCUGCAGGGUGUGAGAAACUCCUAUUGCUGGACGA | |
| | | | | | UGUCUCUUACGAGGCAUUAGCACAUCCCUCACUAUUC | |
| | | | | | UGGUCGUG | |
| TSBTx39 | TAP2 | Cas12b | UGGUCGUGUGAUUG | 805 | GUUCUGUCUUUUGGUCAGGACAACCGUCUAGCUAUAA | 972 |
| 35 | | | ACAUCCUG | | GUGCUGCAGGGUGUGAGAAACUCCUAUUGCUGGACGA | |
| | | | | | UGUCUCUUACGAGGCAUUAGCACUGGUCGUGUGAUUG | |
| | | | | | ACAUCCUG | |
| TSBTx39 | TAP2 | Cas12b | UGACCCCCAUGCCU | 806 | GUUCUGUCUUUUGGUCAGGACAACCGUCUAGCUAUAA | 973 |
| 36 | | | UUGCCAGU | | GUGCUGCAGGGUGUGAGAAACUCCUAUUGCUGGACGA | |
| | | | | | UGUCUCUUACGAGGCAUUAGCACUGACCCCCAUGCCU | |
| | | | | | UUGCCAGU | |
| TSBTx39 | TAP2 | Cas12b | GAGACAUGGUGUAG | 807 | GUUCUGUCUUUUGGUCAGGACAACCGUCUAGCUAUAA | 974 |
| 37 | | | GUGAAGCA | | GUGCUGCAGGGUGUGAGAAACUCCUAUUGCUGGACGA | |
| | | | | | UGUCUCUUACGAGGCAUUAGCACGAGACAUGGUGUAG | |
| | | | | | GUGAAGCA | |
| TSBTx39 | TAP2 | Cas12b | AAAGGAAGCCAGUU | 808 | GUUCUGUCUUUUGGUCAGGACAACCGUCUAGCUAUAA | 975 |
| 38 | | | ACUCAUCA | | GUGCUGCAGGGUGUGAGAAACUCCUAUUGCUGGACGA | |
| | | | | | UGUCUCUUACGAGGCAUUAGCACAAAGGAAGCCAGUU | |
| | | | | | ACUCAUCA | |
| TSBTx39 | TAP2 | Cas12b | UGAAGGGCAUGUGC | 809 | GUUCUGUCUUUUGGUCAGGACAACCGUCUAGCUAUAA | 976 |
| 39 | | | AGCAGAGA | | GUGCUGCAGGGUGUGAGAAACUCCUAUUGCUGGACGA | |
| | | | | | UGUCUCUUACGAGGCAUUAGCACUGAAGGGCAUGUGC | |
| | | | | | AGCAGAGA | |
| TSBTx39 | TAP2 | Cas12b | UUCAAGGGCCUCUU | 810 | GUUCUGUCUUUUGGUCAGGACAACCGUCUAGCUAUAA | 977 |
| 40 | | | UAUAGCGA | | GUGCUGCAGGGUGUGAGAAACUCCUAUUGCUGGACGA | |
| | | | | | UGUCUCUUACGAGGCAUUAGCACUUCAAGGGCCUCUU | |
| | | | | | UAUAGCGA | |
| TSBTx39 | TAP2 | Cas12b | GGCUGUCGGUCCAU | 811 | GUUCUGUCUUUUGGUCAGGACAACCGUCUAGCUAUAA | 978 |
| 41 | | | GUAGGAGA | | GUGCUGCAGGGUGUGAGAAACUCCUAUUGCUGGACGA | |
| | | | | | UGUCUCUUACGAGGCAUUAGCACGGCUGUCGGUCCAU | |
| | | | | | GUAGGAGA | |
| TSBTx39 | TAP2 | Cas12b | CACAACCCCCUGCA | 812 | GUUCUGUCUUUUGGUCAGGACAACCGUCUAGCUAUAA | 979 |
| 42 | | | GAGUGGUG | | GUGCUGCAGGGUGUGAGAAACUCCUAUUGCUGGACGA | |
| | | | | | UGUCUCUUACGAGGCAUUAGCACCACAACCCCCUGCA | |
| | | | | | GAGUGGUG | |
| TSBTx41 | HLA-A | ABE, | UGACGGCCAUCCUC | 813 | UGACGGCCAUCCUCGGCGUCGUUUUAGAGCUAGAAAU | 980 |
| 86 (846) | | CBE | GGCGUC | | AGCAAGUUAAAAUAAGGCUAGUCCGUUAUCAACUUGA | |
| | | | | | AAAAGUGGCACCGAGUCGGUGCUUUU | |
| TSBTx41 | HLA-A | ABE, | GACGGCCAUCCUCG | 814 | GACGGCCAUCCUCGGCGUCUGUUUUAGAGCUAGAAAU | 981 |
| 87 (847) | | CBE | GCGUCU | | AGCAAGUUAAAAUAAGGCUAGUCCGUUAUCAACUUGA | |
| | | | | | AAAAGUGGCACCGAGUCGGUGCUUUU | |
| TSBTx41 | HLA-A | ABE, | ACGGCCAUCCUCGG | 815 | ACGGCCAUCCUCGGCGUCUGGUUUUAGAGCUAGAAAU | 982 |
| 88 (848) | | CBE | CGUCUG | | AGCAAGUUAAAAUAAGGCUAGUCCGUUAUCAACUUGA | |
| | | | | | AAAAGUGGCACCGAGUCGGUGCUUUU | |
| TSBTx41 | HLA-A | ABE, | CGCACUCACCCGCC | 816 | CGCACUCACCCGCCCAGGUCGUUUUAGAGCUAGAAAU | 983 |
| 89 (849) | | CBE | CAGGUC | | AGCAAGUUAAAAUAAGGCUAGUCCGUUAUCAACUUGA | |
| | | | | | AAAAGUGGCACCGAGUCGGUGCUUUU | |
| TSBTx41 | HLA-A | ABE, | GCACUCACCCGCCC | 817 | GCACUCACCCGCCCAGGUCUGUUUUAGAGCUAGAAAU | 984 |
| 90 (850) | | CBE | AGGUCU | | AGCAAGUUAAAAUAAGGCUAGUCCGUUAUCAACUUGA | |
| | | | | | AAAAGUGGCACCGAGUCGGUGCUUUU | |
| TSBTx41 | HLA-A | ABE | CCCAGGCUCGCACU | 818 | CCCAGGCUCGCACUCCAUGGUUUUAGAGCUAGAAAUA | 985 |
| 91 (851) | | | CCAUG | | GCAAGUUAAAAUAAGGCUAGUCCGUUAUCAACUUGAA | |
| | | | | | AAAGUGGCACCGAGUCGGUGCUUUU | |
| TSBTx41 | HLA-A, | ABE, | GUCACUCACCGGCC | 819 | GUCACUCACCGGCCUCGCUCGUUUUAGAGCUAGAAAU | 986 |
| 92 (852) | HLA-B, | CBE | UCGCUC | | AGCAAGUUAAAAUAAGGCUAGUCCGUUAUCAACUUGA | |
| | HLA-C | | | | AAAAGUGGCACCGAGUCGGUGCUUUU | |
| TSBTx41 | HLA-A, | ABE, | CCUUACCCCAUCUC | 820 | CCUUACCCCAUCUCAGGGUGGUUUUAGAGCUAGAAAU | 987 |
| 93 (853) | HLA-B, | CBE | AGGGUG | | AGCAAGUUAAAAUAAGGCUAGUCCGUUAUCAACUUGA | |
| | HLA-C | | | | AAAAGUGGCACCGAGUCGGUGCUUUU | |
| TSBTx41 | HLA-A, | ABE, | CUUACCCCAUCUCA | 821 | CUUACCCCAUCUCAGGGUGAGUUUUAGAGCUAGAAAU | 988 |
| 94 (854) | HLA-B, | CBE | GGGUGA | | AGCAAGUUAAAAUAAGGCUAGUCCGUUAUCAACUUGA | |
| | HLA-C | | | | AAAAGUGGCACCGAGUCGGUGCUUUU | |
| TSBTx41 | HLA-A | CBE | GGCUCUGGGAAAAG | 822 | GGCUCUGGGAAAAGAGGGGAGUUUUAGAGCUAGAAAU | 989 |
| 95 (855) | | | AGGGGA | | AGCAAGUUAAAAUAAGGCUAGUCCGUUAUCAACUUGA | |
| | | | | | AAAAGUGGCACCGAGUCGGUGCUUUU | |
| TSBTx41 | HLA-A | ABE | CUUCCCACAGAUAG | 823 | CUUCCCACAGAUAGAAAAGGGUUUUAGAGCUAGAAAU | 990 |
| 96 (856) | | | AAAAGG | | AGCAAGUUAAAAUAAGGCUAGUCCGUUAUCAACUUGA | |
| | | | | | AAAAGUGGCACCGAGUCGGUGCUUUU | |
| TSBT×41 | HLA-A | ABE | UUCCCACAGAUAGA | 824 | UUCCCACAGAUAGAAAAGGAGUUUUAGAGCUAGAAAU | 991 |
| 97 (857) | | | AAAGGA | | AGCAAGUUAAAAUAAGGCUAGUCCGUUAUCAACUUGA | |
| | | | | | AAAAGUGGCACCGAGUCGGUGCUUUU | |
| TSBTx41 | HLA-A | ABE | CCCAGGCAGUGACA | 825 | CCCAGGCAGUGACAGUGCCCGUUUUAGAGCUAGAAAU | 992 |
| 98 (858) | | | GUGCCC | | AGCAAGUUAAAAUAAGGCUAGUCCGUUAUCAACUUGA | |
| | | | | | AAAAGUGGCACCGAGUCGGUGCUUUU | |
| TSBTx41 | HLA-A | ABE | CCAGGCAGUGACAG | 826 | CCAGGCAGUGACAGUGCCCAGUUUUAGAGCUAGAAAU | 993 |
| 99 (859) | | | UGCCCA | | AGCAAGUUAAAAUAAGGCUAGUCCGUUAUCAACUUGA | |
| | | | | | AAAAGUGGCACCGAGUCGGUGCUUUU | |
| TSBTx42 | HLA-B, | ABE | GACCCGCAUCUCGG | 827 | GACCCGCAUCUCGGCGUCUGGUUUUAGAGCUAGAAAU | 994 |
| 00 (860) | HLA-C | | CGUCUG | | AGCAAGUUAAAAUAAGGCUAGUCCGUUAUCAACUUGA | |
| | | | | | AAAAGUGGCACCGAGUCGGUGCUUUU | |
| TSBTx42 | HLA-B | ABE, | GCACUCACCGGCCC | 828 | GCACUCACCGGCCCAGGUCUGUUUUAGAGCUAGAAAU | 995 |
| 01 (861) | | CBE | AGGUCU | | AGCAAGUUAAAAUAAGGCUAGUCCGUUAUCAACUUGA | |
| | | | | | AAAAGUGGCACCGAGUCGGUGCUUUU | |
| TSBTx42 | HLA-B | CBE | UGGGAGCCUGGGGG | 829 | UGGGAGCCUGGGGGCGAGGAGUUUUAGAGCUAGAAAU | 996 |
| 02 (862) | | | CGAGGA | | AGCAAGUUAAAAUAAGGCUAGUCCGUUAUCAACUUGA | |
| | | | | | AAAAGUGGCACCGAGUCGGUGCUUUU | |
| TSBTx42 | HLA-B | CBE | GGGAGCCUGGGGGC | 830 | GGGAGCCUGGGGGCGAGGAGGUUUUAGAGCUAGAAAU | 997 |
| 03 (863) | | | GAGGAG | | AGCAAGUUAAAAUAAGGCUAGUCCGUUAUCAACUUGA | |
| | | | | | AAAAGUGGCACCGAGUCGGUGCUUUU | |
| TSBTx42 | HLA-B, | ABE | CCCCAGGCUCCCAC | 831 | CCCCAGGCUCCCACUCCAUGGUUUUAGAGCUAGAAAU | 998 |
| 04 (864) | HLA-C | | UCCAUG | | AGCAAGUUAAAAUAAGGCUAGUCCGUUAUCAACUUGA | |
| | | | | | AAAAGUGGCACCGAGUCGGUGCUUUU | |
| TSBTx42 | HLA-B, | ABE, | UUACCCCAUCUCAG | 832 | UUACCCCAUCUCAGGGUGAGGUUUUAGAGCUAGAAAU | 999 |
| 05 (865) | HLA-C | CBE | GGUGAG | | AGCAAGUUAAAAUAAGGCUAGUCCGUUAUCAACUUGA | |
| | | | | | AAAAGUGGCACCGAGUCGGUGCUUUU | |
| TSBTx42 | HLA-B, | ABE | UUCCCACAGGUGGA | 833 | UUCCCACAGGUGGAAAAGGAGUUUUAGAGCUAGAAAU | 1000 |
| 06 (866) | HLA-C | | AAAGGA | | AGCAAGUUAAAAUAAGGCUAGUCCGUUAUCAACUUGA | |
| | | | | | AAAAGUGGCACCGAGUCGGUGCUUUU | |
| TSBTx42 | HLA-C | ABE, | UGACCCGCAUCUCG | 834 | UGACCCGCAUCUCGGCGUCUGUUUUAGAGCUAGAAAU | 1001 |
| 07 (867) | | CBE | GCGUCU | | AGCAAGUUAAAAUAAGGCUAGUCCGUUAUCAACUUGA | |
| | | | | | AAAAGUGGCACCGAGUCGGUGCUUUU | |
| TSBTx42 | HLA-C | ABE, | GCACUCACAGGCCC | 835 | GCACUCACAGGCCCAGGUCUGUUUUAGAGCUAGAAAU | 1002 |
| 08 (868) | | CBE | AGGUCU | | AGCAAGUUAAAAUAAGGCUAGUCCGUUAUCAACUUGA | |
| | | | | | AAAAGUGGCACCGAGUCGGUGCUUUU | |
| TSBTx42 | HLA-C | ABE, | CACAGGCCCAGGUC | 836 | CACAGGCCCAGGUCUCGGUCGUUUUAGAGCUAGAAAU | 1003 |
| 09 (869) | | CBE | UCGGUC | | AGCAAGUUAAAAUAAGGCUAGUCCGUUAUCAACUUGA | |
| | | | | | AAAAGUGGCACCGAGUCGGUGCUUUU | |
| TSBTx42 | HLA-C | CBE | AGACCCUGGCCCCG | 837 | AGACCCUGGCCCCGCCCCCGGUUUUAGAGCUAGAAAU | 1004 |
| 10 (870) | | | CCCCCG | | AGCAAGUUAAAAUAAGGCUAGUCCGUUAUCAACUUGA | |
| | | | | | AAAAGUGGCACCGAGUCGGUGCUUUU | |
| TSBTx42 | HLA-C | CBE | GGCUCUGGGAAAGG | 838 | GGCUCUGGGAAAGGAGGGGAGUUUUAGAGCUAGAAAU | 1005 |
| 11 (871) | | | AGGGGA | | AGCAAGUUAAAAUAAGGCUAGUCCGUUAUCAACUUGA | |
| | | | | | AAAAGUGGCACCGAGUCGGUGCUUUU | |
| TSBTx42 | HLA-C | ABE | CCCAGCCAGCAACA | 839 | CCCAGCCAGCAACAGUGCCCGUUUUAGAGCUAGAAAU | 1006 |
| 12 (872) | | | GUGCCC | | AGCAAGUUAAAAUAAGGCUAGUCCGUUAUCAACUUGA | |
| | | | | | AAAAGUGGCACCGAGUCGGUGCUUUU | |
| TSBTx41 | HLA-C | Cas12b | GGACCGGGAGACAC | 840 | GUUCUGUCUUUUGGUCAGGACAACCGUCUAGCUAUAA | 1007 |
| 67 (873) | | | AGAAGUAC | | GUGCUGCAGGGUGUGAGAAACUCCUAUUGCUGGACGA | |
| | | | | | UGUCUCUUACGAGGCAUUAGCACGGACCGGGAGACAC | |
| | | | | | AGAAGUAC | |
| TSBTx41 | HLA-C, | Cas12b | CAUCGCCCUGAACG | 841 | GUUCUGUCUUUUGGUCAGGACAACCGUCUAGCUAUAA | 1008 |
| 68 (874) | HLA-B, | | AGGACCUG | | GUGCUGCAGGGUGUGAGAAACUCCUAUUGCUGGACGA | |
| | HLA-A | | | | UGUCUCUUACGAGGCAUUAGCACCAUCGCCCUGAACG | |
| | | | | | AGGACCUG | |
| TSBTx41 | HLA-C | Cas12b | CAUCGCCCUGAACG | 842 | GUUCUGUCUUUUGGUCAGGACAACCGUCUAGCUAUAA | 1009 |
| 69 (875) | | | AGGAUCUG | | GUGCUGCAGGGUGUGAGAAACUCCUAUUGCUGGACGA | |
| | | | | | UGUCUCUUACGAGGCAUUAGCACCAUCGCCCUGAACG | |
| | | | | | AGGAUCUG | |
| TSBTx41 | HLA-B | Cas12b | UUGCUGGCCUGGCU | 843 | GUUCUGUCUUUUGGUCAGGACAACCGUCUAGCUAUAA | 1010 |
| 70 (876) | | | GUCCUAGC | | GUGCUGCAGGGUGUGAGAAACUCCUAUUGCUGGACGA | |
| | | | | | UGUCUCUUACGAGGCAUUAGCACUUGCUGGCCUGGCU | |
| | | | | | GUCCUAGC | |
| TSBTx41 | HLA-A | Cas12b | CAUCGCCCUGAACG | 844 | GUUCUGUCUUUUGGUCAGGACAACCGUCUAGCUAUAA | 1011 |
| 68 (877) | | | AGGACCUG | | GUGCUGCAGGGUGUGAGAAACUCCUAUUGCUGGACGA | |
| | | | | | UGUCUCUUACGAGGCAUUAGCACCAUCGCCCUGAACG | |
| | | | | | AGGACCUG | |
| TSBTx42 | Nectin-2 | ABE/CB | CGGGCCAUGGAGGG | 1050 | CGGGCCAUGGAGGGCCCGGGGUUUUAGAGCUAGAAAU | 1065 |
| 13 | | E/CABE | CCCGGG | | AGCAAGUUAAAAUAAGGCUAGUCCGUUAUCAACUUGA | |
| | | | | | AAAAGUGGCACCGAGUCGGUGCUUUU | |
| TSBTx42 | Nectin-2 | ABE/CB | GGGCCAUGGAGGGC | 1051 | GGGCCAUGGAGGGCCCGGGAGUUUUAGAGCUAGAAAU | 1066 |
| 14 | | E/CABE | CCGGGA | | AGCAAGUUAAAAUAAGGCUAGUCCGUUAUCAACUUGA | |
| | | | | | AAAAGUGGCACCGAGUCGGUGCUUUU | |
| TSBTx42 | Nectin-2 | ABE/CB | GGCCAUGGAGGGCC | 1052 | GGCCAUGGAGGGCCCGGGAGGUUUUAGAGCUAGAAAU | 1067 |
| 15 | | E/CABE | CGGGAG | | AGCAAGUUAAAAUAAGGCUAGUCCGUUAUCAACUUGA | |
| | | | | | AAAAGUGGCACCGAGUCGGUGCUUUU | |
| TSBTx42 | Nectin-2 | ABE/CB | CUCACCUAUGACUC | 1053 | CUCACCUAUGACUCUGAGCCGUUUUAGAGCUAGAAAU | 1068 |
| 16 | | E/CABE | UGAGCC | | AGCAAGUUAAAAUAAGGCUAGUCCGUUAUCAACUUGA | |
| | | | | | AAAAGUGGCACCGAGUCGGUGCUUUU | |
| TSBTx42 | Nectin-2 | CBE | UUGGCUGGGGAGAG | 1054 | UUGGCUGGGGAGAGGAGGAGGUUUUAGAGCUAGAAAU | 1069 |
| 17 | | | GAGGAG | | AGCAAGUUAAAAUAAGGCUAGUCCGUUAUCAACUUGA | |
| | | | | | AAAAGUGGCACCGAGUCGGUGCUUUU | |
| TSBTx42 | Nectin-2 | CBE | UGGCUGGGGAGAGG | 1055 | UGGCUGGGGAGAGGAGGAGAGUUUUAGAGCUAGAAAU | 1070 |
| 18 | | | AGGAGA | | AGCAAGUUAAAAUAAGGCUAGUCCGUUAUCAACUUGA | |
| | | | | | AAAAGUGGCACCGAGUCGGUGCUUUU | |
| TSBTx42 | Nectin-2 | ABE/CB | UACACUCACAGCGU | 1056 | UACACUCACAGCGUACAGAGGUUUUAGAGCUAGAAAU | 1071 |
| 19 | | E/CABE | ACAGAG | | AGCAAGUUAAAAUAAGGCUAGUCCGUUAUCAACUUGA | |
| | | | | | AAAAGUGGCACCGAGUCGGUGCUUUU | |
| TSBTx42 | Nectin-2 | ABE/CB | ACACUCACAGCGUA | 1057 | ACACUCACAGCGUACAGAGAGUUUUAGAGCUAGAAAU | 1072 |
| 20 | | E/CABE | CAGAGA | | AGCAAGUUAAAAUAAGGCUAGUCCGUUAUCAACUUGA | |
| | | | | | AAAAGUGGCACCGAGUCGGUGCUUUU | |
| TSBTx42 | Nectin-2 | CBE | GGAGGGUCUGGGGG | 1058 | GGAGGGUCUGGGGGAAAUGGGUUUUAGAGCUAGAAAU | 1073 |
| 21 | | | AAAUGG | | AGCAAGUUAAAAUAAGGCUAGUCCGUUAUCAACUUGA | |
| | | | | | AAAAGUGGCACCGAGUCGGUGCUUUU | |
| TSBTx42 | Nectin-2 | CBE | GAGGGUCUGGGGGA | 1059 | GAGGGUCUGGGGGAAAUGGGGUUUUAGAGCUAGAAAU | 1074 |
| 22 | | | AAUGGG | | AGCAAGUUAAAAUAAGGCUAGUCCGUUAUCAACUUGA | |
| | | | | | AAAAGUGGCACCGAGUCGGUGCUUUU | |
| TSBTx42 | Nectin-2 | CBE | CAGGCUGUGGGGUA | 1060 | CAGGCUGUGGGGUAGGAGGUGUUUUAGAGCUAGAAAU | 1075 |
| 23 | | | GGAGGU | | AGCAAGUUAAAAUAAGGCUAGUCCGUUAUCAACUUGA | |
| | | | | | AAAAGUGGCACCGAGUCGGUGCUUUU | |
| TSBTx42 | Nectin-2 | CBE | GGGCUGUAGUGGGA | 1061 | GGGCUGUAGUGGGAGAGGGGGUUUUAGAGCUAGAAAU | 1076 |
| 24 | | | GAGGGG | | AGCAAGUUAAAAUAAGGCUAGUCCGUUAUCAACUUGA | |
| | | | | | AAAAGUGGCACCGAGUCGGUGCUUUU | |
| TSBTx42 | Nectin-2 | CBE | GGAGGGCUGUAGUG | 1062 | GGAGGGCUGUAGUGGGAGAGGUUUUAGAGCUAGAAAU | 1077 |
| 25 | | | GGAGAG | | AGCAAGUUAAAAUAAGGCUAGUCCGUUAUCAACUUGA | |
| | | | | | AAAAGUGGCACCGAGUCGGUGCUUUU | |
| TSBTx42 | Nectin-2 | ABE/CB | UCCUACCUGCUCAG | 1063 | UCCUACCUGCUCAGUGCAUGGUUUUAGAGCUAGAAAU | 1078 |
| 26 | | E/CABE | UGCAUG | | AGCAAGUUAAAAUAAGGCUAGUCCGUUAUCAACUUGA | |
| | | | | | AAAAGUGGCACCGAGUCGGUGCUUUU | |
| TSBTx42 | Nectin-2 | CBE | CAUUUCCUGGAGGU | 1064 | CAUUUCCUGGAGGUAGAGAGGUUUUAGAGCUAGAAAU | 1079 |
| 27 | | | AGAGAG | | AGCAAGUUAAAAUAAGGCUAGUCCGUUAUCAACUUGA | |
| | | | | | AAAAGUGGCACCGAGUCGGUGCUUUU | |
| tap1_93 | TAP1 | CBE | ACCGCCCAGACCCG | 1121 | ACCGCCCAGACCCGGAGCAGGUUUUAGAGCUAGAAAU | 1148 |
| | | | GAGCAG | | AGCAAGUUAAAAUAAGGCUAGUCCGUUAUCAACUUGA | |
| | | | | | AAAAGUGGCACCGAGUCGGUGCUUUU | |
| tapbp_53 | TAPBP | CBE | GCGGGGUCUGAGUG | 1122 | GCGGGGUCUGAGUGUAGAGAGUUUUAGAGCUAGAAAU | 1149 |
| | | | UAGAGA | | AGCAAGUUAAAAUAAGGCUAGUCCGUUAUCAACUUGA | |
| | | | | | AAAAGUGGCACCGAGUCGGUGCUUUU | |
| tap2_5 | TAP2 | CBE | GAGGUCCAGGGUCU | 1123 | GAGGUCCAGGGUCUCAGGUCGUUUUAGAGCUAGAAAU | 1150 |
| | | | CAGGUC | | AGCAAGUUAAAAUAAGGCUAGUCCGUUAUCAACUUGA | |
| | | | | | AAAAGUGGCACCGAGUCGGUGCUUUU | |
| tap1_210 | TAP1 | CBE | GUAGAAUCCAGUCA | 1124 | GUAGAAUCCAGUCAGUGAGGGUUUUAGAGCUAGAAAU | 1151 |
| | | | GUGAGG | | AGCAAGUUAAAAUAAGGCUAGUCCGUUAUCAACUUGA | |
| | | | | | AAAAGUGGCACCGAGUCGGUGCUUUU | |
| tapbp_18 | TAPBP | CBE | GAACCAACACUCGA | 1125 | GAACCAACACUCGAUCACCGGUUUUAGAGCUAGAAAU | 1152 |
| | | | UCACCG | | AGCAAGUUAAAAUAAGGCUAGUCCGUUAUCAACUUGA | |
| | | | | | AAAAGUGGCACCGAGUCGGUGCUUUU | |
| tap2_4 | TAP2 | CBE | AGGUCCAGGGUCUC | 1126 | AGGUCCAGGGUCUCAGGUCAGUUUUAGAGCUAGAAAU | 1153 |
| | | | AGGUCA | | AGCAAGUUAAAAUAAGGCUAGUCCGUUAUCAACUUGA | |
| | | | | | AAAAGUGGCACCGAGUCGGUGCUUUU | |
| tapbp_5 | TAPBP | CBE | GCUCACCCAAAGCC | 1127 | GCUCACCCAAAGCCACAGCGGUUUUAGAGCUAGAAAU | 1154 |
| | | | ACAGCG | | AGCAAGUUAAAAUAAGGCUAGUCCGUUAUCAACUUGA | |
| | | | | | AAAAGUGGCACCGAGUCGGUGCUUUU | |
| tap 1_498 | TAP1 | CBE | CACCCAGCACCUCA | 1128 | CACCCAGCACCUCAGCCUGGGUUUUAGAGCUAGAAAU | 1155 |
| | | | GCCUGG | | AGCAAGUUAAAAUAAGGCUAGUCCGUUAUCAACUUGA | |
| | | | | | AAAAGUGGCACCGAGUCGGUGCUUUU | |
| tap2_181 | TAP2 | CBE | AAGCCAGUUACUCA | 1129 | AAGCCAGUUACUCAUCAGGGGUUUUAGAGCUAGAAAU | 1156 |
| | | | UCAGGG | | AGCAAGUUAAAAUAAGGCUAGUCCGUUAUCAACUUGA | |
| | | | | | AAAAGUGGCACCGAGUCGGUGCUUUU | |
| b2m 825 | B2M | CBE | ACUCACGCUGGAUA | 1130 | ACUCACGCUGGAUAGCCUCCGUUUUAGAGCUAGAAAU | 1157 |
| (TSBTx84 | | | GCCUCC | | AGCAAGUUAAAAUAAGGCUAGUCCGUUAUCAACUUGA | |
| 5) | | | | | AAAAGUGGCACCGAGUCGGUGCUUUU | |
| tap1_140 | TAP1 | CBE | UGUUCCGAGAGCUG | 1131 | UGUUCCGAGAGCUGAUCUCAGUUUUAGAGCUAGAAAU | 1158 |
| | | | AUCUCA | | AGCAAGUUAAAAUAAGGCUAGUCCGUUAUCAACUUGA | |
| | | | | | AAAAGUGGCACCGAGUCGGUGCUUUU | |
| tap1_202 | TAP2 | CBE | CCCCUGGAGAAAGA | 1132 | CCCCUGGAGAAAGAGAAGAGGUUUUAGAGCUAGAAAU | 1159 |
| | | | GAAGAG | | AGCAAGUUAAAAUAAGGCUAGUCCGUUAUCAACUUGA | |
| | | | | | AAAAGUGGCACCGAGUCGGUGCUUUU | |
| tapbp_64 | TAPBP | CBE | CCCUCCAGGCUGCC | 1133 | CCCUCCAGGCUGCCUUCAGGGUUUUAGAGCUAGAAAU | 1160 |
| | | | UUCAGG | | AGCAAGUUAAAAUAAGGCUAGUCCGUUAUCAACUUGA | |
| | | | | | AAAAGUGGCACCGAGUCGGUGCUUUU | |
| tap1_485 | TAP1 | CBE | CUCCACCUGAGGAA | 1134 | CUCCACCUGAGGAAAGACAUGUUUUAGAGCUAGAAAU | 1161 |
| | | | AGACAU | | AGCAAGUUAAAAUAAGGCUAGUCCGUUAUCAACUUGA | |
| | | | | | AAAAGUGGCACCGAGUCGGUGCUUUU | |
| tap1_142 | TAP1 | CBE | UUCCGAGAGCUGAU | 1135 | UUCCGAGAGCUGAUCUCAUGGUUUUAGAGCUAGAAAU | 1162 |
| | | | CUCAUG | | AGCAAGUUAAAAUAAGGCUAGUCCGUUAUCAACUUGA | |
| | | | | | AAAAGUGGCACCGAGUCGGUGCUUUU | |
| b2m 630 | B2M | CBE | AAGUCAACUUCAAU | 1136 | AAGUCAACUUCAAUGUCGGAGUUUUAGAGCUAGAAAU | 1163 |
| | | | GUCGGA | | AGCAAGUUAAAAUAAGGCUAGUCCGUUAUCAACUUGA | |
| | | | | | AAAAGUGGCACCGAGUCGGUGCUUUU | |
| tap2_325 | TAP2 | CBE | GCACCUGUCCCCCU | 1137 | GCACCUGUCCCCCUGUGGGCGUUUUAGAGCUAGAAAU | 1164 |
| | | | GUGGGC | | AGCAAGUUAAAAUAAGGCUAGUCCGUUAUCAACUUGA | |
| | | | | | AAAAGUGGCACCGAGUCGGUGCUUUU | |
| tap1_139 | TAP1 | CBE | CUCCCCAUGAGAUC | 1138 | CUCCCCAUGAGAUCAGCUCUGUUUUAGAGCUAGAAAU | 1165 |
| | | | AGCUCU | | AGCAAGUUAAAAUAAGGCUAGUCCGUUAUCAACUUGA | |
| | | | | | AAAAGUGGCACCGAGUCGGUGCUUUU | |
| tap1_38 | TAP1 | CBE | GGACUCUCCGCGCC | 1139 | GGACUCUCCGCGCCCCGGUGGUUUUAGAGCUAGAAAU | 1166 |
| | | | CCGGUG | | AGCAAGUUAAAAUAAGGCUAGUCCGUUAUCAACUUGA | |
| | | | | | AAAAGUGGCACCGAGUCGGUGCUUUU | |
| tapbp_79 | TAPBP | CBE | UGGCCCAUUUCGCA | 1140 | UGGCCCAUUUCGCAGAGGCGGUUUUAGAGCUAGAAAU | 1167 |
| | | | GAGGCG | | AGCAAGUUAAAAUAAGGCUAGUCCGUUAUCAACUUGA | |
| | | | | | AAAAGUGGCACCGAGUCGGUGCUUUU | |
| b2m 227 | B2M | CBE | GGAUUUGCCUAGCU | 1141 | GGAUUUGCCUAGCUUCCCCAGUUUUAGAGCUAGAAAU | 1168 |
| | | | UCCCCA | | AGCAAGUUAAAAUAAGGCUAGUCCGUUAUCAACUUGA | |
| | | | | | AAAAGUGGCACCGAGUCGGUGCUUUU | |
| tapbp_80 | TAPBP | CBE | CUGGCCCAUUUCGC | 1142 | CUGGCCCAUUUCGCAGAGGCGUUUUAGAGCUAGAAAU | 1169 |
| | | | AGAGGC | | AGCAAGUUAAAAUAAGGCUAGUCCGUUAUCAACUUGA | |
| | | | | | AAAAGUGGCACCGAGUCGGUGCUUUU | |
| b2m 596 | B2M | CBE | UCGAUCUAUGAAAA | 1143 | UCGAUCUAUGAAAAAGACAGGUUUUAGAGCUAGAAAU | 1170 |
| | | | AGACAG | | AGCAAGUUAAAAUAAGGCUAGUCCGUUAUCAACUUGA | |
| | | | | | AAAAGUGGCACCGAGUCGGUGCUUUU | |
| tap1_444 | TAP1 | CBE | GACCCAGAAGCCAA | 1144 | GACCCAGAAGCCAACUAUGGGUUUUAGAGCUAGAAAU | 1171 |
| | | | CUAUGG | | AGCAAGUUAAAAUAAGGCUAGUCCGUUAUCAACUUGA | |
| | | | | | AAAAGUGGCACCGAGUCGGUGCUUUU | |
| tap1_161 | TAP1 | CBE | UUGUGCCACAGGGC | 1145 | UUGUGCCACAGGGCUGCUGCGUUUUAGAGCUAGAAAU | 1172 |
| | | | UGCUGC | | AGCAAGUUAAAAUAAGGCUAGUCCGUUAUCAACUUGA | |
| | | | | | AAAAGUGGCACCGAGUCGGUGCUUUU | |
| tap1_454 | TAP1 | CBE | GUACCUGUGUCAUA | 1146 | GUACCUGUGUCAUAGCCCUGGUUUUAGAGCUAGAAAU | 1173 |
| | | | GCCCUG | | AGCAAGUUAAAAUAAGGCUAGUCCGUUAUCAACUUGA | |
| | | | | | AAAAGUGGCACCGAGUCGGUGCUUUU | |
| tap2_137 | TAP2 | CBE | CCUACCUGCCAAAG | 1147 | CCUACCUGCCAAAGGAGAAGGUUUUAGAGCUAGAAAU | 1174 |
| | | | GAGAAG | | AGCAAGUUAAAAUAAGGCUAGUCCGUUAUCAACUUGA | |
| | | | | | AAAAGUGGCACCGAGUCGGUGCUUUU | |

TABLE 1B
Guide RNAs

| | | Base | | | |
|---|---|---|---|---|---|
| Guide | | Editor/ | | | |
| Name | Gene | Nuclease | Spacer Sequence | PAM | gRNA sequence |
| CD58.1 | CD58 | ABE/CBE/ | GCAACCAUGGCUCGUCGGGC | CGG | GCAACCAUGGCUCGUCGGGCGUUUUAGAGCUAGAAAUAGCAAGUU |
| | | CABE/Cas9 | (SEQ ID NO: 672) | | AAAAUAAGGCUAGUCCGUUAUCAACUUGAAAAAGUGGCACCGA |
| | | | | | GUCGGUGCUUUU |
| | | | | | (SEQ ID NO: 675) |
| CD58.2 | CD58 | CBE/ABE/ | ACUCACCAAAGCAGUGCAGC | AGG | ACUCACCAAAGCAGUGCAGCGUUUUAGAGCUAGAAAUAGCAAGUU |
| | | CAS9 | (SEQ ID NO: 673) | | AAAAUAAGGCUAGUCCGUUAUCAACUUGAAAAAGUGGCACCGA |
| | | | | | GUCGGUGCUUUU |
| | | | | | (SEQ ID NO: 676) |
| CD58.3 | CD58 | CBE/ABE/ | CUCACCGCUGCUUGGGAUAC | AGG | CUCACCGCUGCUUGGGAUACGUUUUAGAGCUAGAAAUAGCAAGUU |
| | | Cas9 | (SEQ ID NO: 674) | | AAAAUAAGGCUAGUCCGUUAUCAACUUGAAAAAGUGGCACCGA |
| | | | | | GUCGGUGCUUUU |
| | | | | | (SEQ ID NO: 677) |

TABLE 1C
PAM sequences (in bold) corresponding to the guide RNA's of Table 1A

| Guide No. | PAM | gRNA Target + PAM | SEQ ID NO: |
|---|---|---|---|
| TSBTx4186 (846) | TGG | TGACGGCCATCCTCGGCGTCTGG | 1086 |
| TSBTx4187 (847) | GGG | GACGGCCATCCTCGGCGTCTGGG | 1087 |
| TSBTx4188 (848) | GGG | ACGGCCATCCTCGGCGTCTGGGG | 1088 |
| TSBTx4189 (849) | TGG | CGCACTCACCCGCCCAGGTCTGG | 1089 |
| TSBTx4190 (850) | GGG | GCACTCACCCGCCCAGGTCTGGG | 1090 |
| TSBTx4191 (851) | AGG | CCCAGGCTCGCACTCCATGAGG | 1091 |
| TSBTx4192 (852) | TGG | GTCACTCACCGGCCTCGCTCTGG | 1092 |
| TSBTx4193 (853) | AGG | CCTTACCCCATCTCAGGGTGAGG | 1093 |
| TSBTx4194 (854) | GGG | CTTACCCCATCTCAGGGTGAGGG | 1094 |
| TSBTx4195 (855) | AGG | GGCTCTGGGAAAAGAGGGGAAGG | 1095 |
| TSBTx4196 (856) | AGG | CTTCCCACAGATAGAAAAGGAGG | 1096 |
| TSBTx4197 (857) | GGG | TTCCCACAGATAGAAAAGGAGGG | 1097 |
| TSBTx4198 (858) | AGG | CCCAGGCAGTGACAGTGCCCAGG | 1098 |
| TSBTx4199 (859) | GGG | CCAGGCAGTGACAGTGCCCAGGG | 1099 |
| TSBTx4200 (860) | AGG | GACCCGCATCTCGGCGTCTGAGG | 1100 |
| TSBTx4201 (861) | CGG | GCACTCACCGGCCCAGGTCTCGG | 1101 |
| TSBTx4202 (862) | GGG | TGGGAGCCTGGGGGCGAGGAGGG | 1102 |
| TSBTx4203 (863) | GGG | GGGAGCCTGGGGGCGAGGAGGGG | 1103 |
| TSBTx4204 (864) | AGG | CCCCAGGCTCCCACTCCATGAGG | 1104 |
| TSBTx4205 (865) | GGG | TTACCCCATCTCAGGGTGAGGGG | 1105 |
| TSBTx4206 (866) | GGG | TTCCCACAGGTGGAAAAGGAGGG | 1106 |
| TSBTx4207 (867) | GGG | TGACCCGCATCTCGGCGTCTGGG | 1107 |
| TSBTx4208 (868) | CGG | GCACTCACAGGCCCAGGTCTCGG | 1108 |
| TSBTx4209 (869) | AGG | CACAGGCCCAGGTCTCGGTCAGG | 1109 |
| TSBTx4210 (870) | TGG | AGACCCTGGCCCCGCCCCCGTGG | 1110 |
| TSBTx4211 (871) | AGG | GGCTCTGGGAAAGGAGGGGAAGG | 1111 |
| TSBTx4212 (872) | AGG | CCCAGCCAGCAACAGTGCCCAGG | 1112 |
| TSBT×4167 (873) | ATTG | ATTGGGACCGGGAGACACAGAAGTAC | 1113 |
| TSBTx4168 (874) | ATTA | ATTACATCGCCCTGAACGAGGACCTG | 1114 |
| TSBTx4169 (875) | ATTA | ATTACATCGCCCTGAACGAGGATCTG | 1115 |
| TSBTx4170 (876) | ATTG | ATTGTTGCTGGCCTGGCTGTCCTAGC | 1116 |
| TSBTx4168 (877) | ATTA | ATTACATCGCCCTGAACGAGGACCTG | 1117 |

TABLE 1D
Exemplary guide RNAs

| Target | | | |
|---|---|---|---|
| Gene | gRNA sequence | SEQ ID NO | Editor |
| TRAC | GUUCUGUCUUUUGGUCAGGACAACCGUCUAGCUAUAAGUGC | 1175 | BhCas12b |
| | UGCAGGGUGUGAGAAACUCCUAUUGCUGGACGAUGUCUCUU | | nuclease |
| | ACGAGGCAUUAGCACAGAGUCUCUCAGCUGGUACAC | | |
| TRAC | GUUCUGUCUUUUGGUCAGGACAACCGUCUAGCUAUAAGUGC | 1176 | BhCas12b |
| | UGCAGGGUGUGAGGAAACUCCUAUUGCUGGACGAUGUCUCU | | nuclease |
| | UACGAGGCAUUAGCACACCGAUUUUGAUUCUCAAACA | | |
| TRAC | GUUCUGUCUUUUGGUCAGGACAACCGUCUAGCUAUAAGUGC | 1177 | BhCas12b |
| | UGCAGGGUGUGAGAAACUCCUAUUGCUGGACGAUGUCUCUU | | nuclease |
| | ACGAGGCAUUAGCACUCAAACAAAUGUGCACAAAG | | |
| TRAC | GUUCUGUCUUUUGGUCAGGACAACCGUCUAGCUAUAAGUGC | 1178 | BhCas12b |
| | UGCAGGGUGUGAGAAACUCCUAUUGCUGGACGAUGUCUCUU | | nuclease |
| | ACGAGGCAUUAGCACUCAAACAAAUGUGUCACAAAG | | |
| TRAC | GUUCUGUCUUUUGGUCAGGACAACCGUCUAGCUAUAAGUGC | 1179 | BhCas12b |
| | UGCAGGGUGUGAGAAACUCCUAUUGCUGGACGAUGUCUCUU | | nuclease |
| | ACGAGGCAUUAGCACUUUGAGAAUCAAAAUCGGUA | | |
| TRAC | GUUCUGUCUUUUGGUCAGGACAACCGUCUAGCUAUAAGUGC | 1180 | BhCas12b |
| | UGCAGGGUGUGAGAAACUCCUAUUGCUGGACGAUGUCUCUU | | nuclease |
| | ACGAGGCAUUAGCACUGAUGUGUAUAUCACAGACAA | | |
| TRAC | GUUCUGUCUUUUGGUCAGGACAACCGUCUAGCUAUAAGUGC | 1181 | BhCas12b |
| | UGCAGGGUGUGAGAAACUCCUAUUGCUGGACGAUGUCUCUU | | nuclease |
| | ACGAGGCAUUAGCAGUUGCUCCAGGCCACAGCAU | | |
| TRAC | GUUCUGUCUUUUGGUCAGGACAACCGUCUAGCUAUAAGUGC | 1182 | BhCas12b |
| | UGCAGGGUGUGAGAAACUCCUAUUGCUGGACGAUGUCUCUU | | nuclease |
| | ACGAGGCAUUAGCACUUCCAGAAGACACCUUCUUCC | | |
| TRAC | GUUCUGUCUUUUGGUCAGGACAACCGUCUAGCUAUAAGUGC | 1183 | BhCas12b |
| | UGCAGGGUGUGAGAAACUCCUAUUGCUGGACGAUGUCUCUU | | nuclease |
| | ACGAGGCAUUAGCACCAGAAGACACCUUCUUCCCCA | | |
| TRAC | GUUCUGUCUUUUGGUCAGGACAACCGUCUAGCUAUAAGUGC | 1184 | BhCas12b |
| | UGCAGGGUGUGAGAGAAACUCCUAUUGCUGGACGAUGUCUC | | nuclease |
| | UUACGAGGCAUUAGCACGGUUCCGAAUCCUCCUGA | | |
| TRAC | GUUCUGUCUUUUGGUCAGGACAACCGUCUAGCUAUAAGUGC | 1185 | BhCas12b |
| | UGCAGGGUGUGAGAAACUCCUAUUGCUGGACGAUGUCUCUU | | nuclease |
| | ACGAGGCAUUAGCACGGAACCCAAUCACUGACAGGU | | |
| TRAC | GUUCUGUCUUUUGGUCAGGACAACCGUCUAGCUAUAAGUGC | 1186 | BhCas12b |
| | UGCAGGGUGUGAGAAACUCCUAUUGCUGGACGAUGUCUCUU | | |
| | ACGAGGCAUUAGCACAGAGUCUCUCAGCUGGUACA | | |
| TRAC | GUUCUGUCUUUUGGUCAGGACAACCGUCUAGCUAUAAGUGC | 1187 | BhCas12b |
| | UGCAGGGUGUGAGAAACUCCUAUUGCUGGACGAUGUCUCUU | | |
| | ACGAGGCAUUAGCACACCGAUUUUGAUUCUCAAAC | | |
| TRAC | GUUCUGUCUUUUGGUCAGGACAACCGUCUAGCUAUAAGUGC | 1188 | BhCas12b |
| | UGCAGGGUGUGAGAAACUCCUAUUGCUGGACGAUGUCUCUU | | |
| | ACGAGGCAUUAGCACUGAUUCUCAAACAAAUGUGU | | |
| TRAC | GUUCUGUCUUUUGGUCAGGACAACCGUCUAGCUAUAAGUGC | 1189 | BhCas12b |
| | UGCAGGGUGUGAGAAACUCCUAUUGCUGGACGAUGUCUCUU | | |
| | ACGAGGCAUUAGCACUCAAACAAAUGUGUCACAAA | | |
| TRAC | GUUCUGUCUUUUGGUCAGGACAACCGUCUAGCUAUAAGUGC | 1190 | BhCas12b |
| | UGCAGGGUGUGAGAAACUCCUAUUGCUGGACGAUGUCUCUU | | |
| | ACGAGGCAUUAGCACGUUUGAGAAUCAAAAUCGGU | | |
| TRAC | GUUCUGUCUUUUGGUCAGGACAACCGUCUAGCUAUAAGUGC | 1191 | BhCas12b |
| | UGCAGGGUGUGAGAAACUCCUAUUGCUGGACGAUGUCUCUU | | |
| | ACGAGGCAUUAGCACUGAUGUGUAUAUCACAGACA | | |
| TRAC | GUUCUGUCUUUUGGUCAGGACAACCGUCUAGCUAUAAGUGC | 1192 | BhCas12b |
| | UGCAGGGUGUGAGAAACUCCUAUUGCUGGACGAUGUCUCUU | | |
| | ACGAGGCAUUAGCACGUUGCUCCAGGCCACAGCAC | | |
| TRAC | GUUCUGUCUUUUGGUCAGGACAACCGUCUAGCUAUAAGUGC | 1193 | BhCas12b |
| | UGCAGGGUGUGAGAAACUCCUAUUGCUGGACGAUGUCUCUU | | |
| | ACGAGGCAUUAGCACUUCCAGAAGACACCUUCUUC | | |
| TRAC | GUUCUGUCUUUUGGUCAGGACAACCGUCUAGCUAUAAGUGC | 1194 | BhCas12b |
| | UGCAGGGUGUGAGAAACUCCUAUUGCUGGACGAUGUCUCUU | | |
| | ACGAGGCAUUAGCACCAGAAGACACCUUCUUCCCC | | |
| TRAC | GUUCUGUCUUUUGGUCAGGACAACCGUCUAGCUAUAAGUGC | 1195 | BhCas12b |
| | UGCAGGGUGUGAGAAACUCCUAUUGCUGGACGAUGUCUCUU | | |
| | ACGAGGCAUUAGCACGGUUCCGAAUCCUCCUCCUG | | |
| TRAC | GUUCUGUCUUUUGGUCAGGACAACCGUCUAGCUAUAAGUGC | 1196 | BhCas12b |
| | UGCAGGGUGUGAGAAACUCCUAUUGCUGGACGAUGUCUCUU | | |
| | ACGAGGCAUUAGCACGGAACCCAAUCACUGACAGG | | |
| TRAC | GACCUAUAGGGUCAAUGAAUCUGUGCGUGUGCCAUAAGUAA | 1197 | BvCas12b |
| | UUAAAAAUUACCCACCACAGGAGCACCUGAAAACAGGUGCU | | |
| | UGGCACAGAGUCUCUCAGCUGGUACA | | |
| TRAC | GACCUAUAGGGUCAAUGAAUCUGUGCGUGUGCCAUAAGUAA | 1198 | BvCas12b |
| | UUAAAAAUUACCCACCACAGGAGCACCUGAAAACAGGUGCU | | |
| | UGGCACACCGAUUUUGAUUCUCAAAC | | |
| TRAC | GACCUAUAGGGUCAAUGAAUCUGUGCGUGUGCCAUAAGUAA | 1199 | BvCas12b |
| | UUAAAAAUUACCCACCACAGGAGCACCUGAAAACAGGUGCU | | |
| | UGGCACUGAUUCUCAAACAAAUGUGU | | |
| TRAC | GACCUAUAGGGUCAAUGAAUCUGUGCGUGUGCCAUAAGUAA | 1200 | BvCas12b |
| | UUAAAAAUUACCCACCACAGGAGCACCUGAAAACAGGUGCU | | |
| | UGGCACUCAAACAAAUGUGUCACAAA | | |
| TRAC | GACCUAUAGGGUCAAUGAAUCUGUGCGUGUGCCAUAAGUAA | 1201 | BvCas12b |
| | UUAAAAAUUACCCACCACAGGAGCACCUGAAAACAGGUGCU | | |
| | UGGCACGUUUGAGAAUCAAAAUCGGU | | |
| TRAC | GACCUAUAGGGUCAAUGAAUCUGUGCGUGUGCCAUAAGUAA | 1202 | BvCas12b |
| | UUAAAAAUUACCCACCACAGGAGCACCUGAAAACAGGUGCU | | |
| | UGGCACUGAUGUGUAUAUCACAGACA | | |
| TRAC | GACCUAUAGGGUCAAUGAAUCUGUGCGUGUGCCAUAAGUAA | 1203 | BvCas12b |
| | UUAAAAAUUACCCACCACAGGAGCACCUGAAAACAGGUGCU | | |
| | UGGCACGUUGCUCCAGGCCACAGCAC | | |
| TRAC | GACCUAUAGGGUCAAUGAAUCUGUGCGUGUGCCAUAAGUAA | 1204 | BvCas12b |
| | UUAAAAAUUACCCACCACAGGAGCACCUGAAAACAGGUGCU | | |
| | UGGCACUUCCAGAAGACACCUUCUUC | | |
| TRAC | GACCUAUAGGGUCAAUGAAUCUGUGCGUGUGCCAUAAGUAA | 1205 | BvCas12b |
| | UUAAAAAUUACCCACCACAGGAGCACCUGAAAACAGGUGCU | | |
| | UGGCACCAGAAGACACCUUCUUCCCC | | |
| TRAC | GACCUAUAGGGUCAAUGAAUCUGUGCGUGUGCCAUAAGUAA | 1206 | BvCas12b |
| | UUAAAAAUUACCCACCACAGGAGCACCUGAAAACAGGUGCU | | |
| | UGGCACGGUUCCGAAUCCUCCUCCUG | | |
| TRAC | GACCUAUAGGGUCAAUGAAUCUGUGCGUGUGCCAUAAGUAA | 1207 | BvCas12b |
| | UUAAAAAUUACCCACCACAGGAGCACCUGAAAACAGGUGCU | | |
| | UGGCACGGAACCCAAUCACUGACAGG | | |
| TRAC | UUCGUAUCUGUAAAACCAAGGUUUUAGAGCUAGAAAUAGCA | 1208 | CBE, spCas9 |
| | AGUUAAAAUAAGGCUAGUCCGUUAUCAACUUGAAAAAGUGG | | |
| | CACCGAGUCGGUGCUUUU | | |
| CD52 | UUACCUGUACCAUAACCAGGGUUUUAGAGCUAGAAAUAGCA | 1209 | CBE, spCas9 |
| | AGUUAAAAUAAGGCUAGUCCGUUAUCAACUUGAAAAAGUGG | | |
| | CACCGAGUCGGUGCUUUU | | |
| CD52 | CUCUUACCUGUACCAUAACCGUUUUAGAGCUAGAAAUAGCA | 1210 | CBE, spCas9 |
| | AGUUAAAAUAAGGCUAGUCCGUUAUCAACUUGAAAAAGUGG | | |
| | CACCGAGUCGGUGCUUUU | | |
| CD7 | UGCACCUCUGGGGAGGACCUGUUUUAGAGCUAGAAAUAGCA | 1211 | CBE, spCas9 |
| | AGUUAAAAUAAGGCUAGUCCGUUAUCAACUUGAAAAAGUGG | | |
| | CACCGAGUCGGUGCUUUU | | |
| CD7 | CCUACCUGUCACCAGGACCAGUUUUAGAGCUAGAAAUAGCA | 1212 | CBE, spCas9 |
| | AGUUAAAAUAAGGCUAGUCCGUUAUCAACUUGAAAAAGUGG | | |
| | CACCGAGUCGGUGCUUUU | | |
| PD1 | CACCUACCUAAGAACCAUCCGUUUUAGAGCUAGAAAUAGCA | 1213 | CBE, spCas9 |
| | AGUUAAAAUAAGGCUAGUCCGUUAUCAACUUGAAAAAGUGG | | |
| | CACCGAGUCGGUGCUUUU | | |

TABLE 1E
Exemplary Spacer Sequences

| | | Length | | SEQ | | |
|---|---|---|---|---|---|---|
| ID | Target | (bp) | Spacer Sequence | ID NO | PAM | Editor |
| sgRNA990 | HLA | 21 | UCCUUACCCCAUCUCAGGGUG | 447 | AGG | ABE/CBE/CABE |
| | class-I | | | | | |
| sgRNA991 | HLA | 22 | CUCCUUACCCCAUCUCAGGGUG | 448 | AGG | ABE/CBE/CABE |
| | class-I | | | | | |
| sgRNA992 | HLA | 19 | CUUACCCCAUCUCAGGGUG | 449 | AGG | ABE/CBE/CABE |
| | class-I | | | | | |
| sgRNA993 | HLA | 18 | UUACCCCAUCUCAGGGUG | 450 | AGG | ABE/CBE/CABE |
| | class-I | | | | | |
| sgRNA994 | HLA | 21 | CCUUACCCCAUCUCAGGGUGA | 451 | GGG | ABE/CBE/CABE |
| | class-I | | | | | |
| sgRNA995 | HLA | 22 | UCACCCUGAGAUGGGGUAAGGA | 452 | GGG | ABE/CBE/CABE |
| | class-I | | | | | |
| sgRNA996 | HLA | 19 | UUACCCCAUCUCAGGGUGA | 453 | GGG | ABE/CBE/CABE |
| | class-I | | | | | |
| sgRNA997 | HLA | 18 | UACCCCAUCUCAGGGUGA | 454 | GGG | ABE/CBE/CABE |
| | class-I | | | | | |

[0333] In some embodiments, provided herein is an immune cell with at least one modification in an endogenous gene or regulatory elements thereof. In some embodiments, the immune cell may comprise a further modification in at least one, two, three, four, five, six, seven, eight, nine, ten, eleven, twelve, thirteen, fourteen, fifteen, sixteen, seventeen, eighteen, nineteen, twenty or more endogenous genes or regulatory elements thereof. In some embodiments, the at least one modification is a single nucleobase modification. In some embodiments, the at least one modification is implemented by base editing. The base editing may be positioned at any suitable position of the gene, or in a regulatory element of the gene. Thus, it may be appreciated that a single base editing at a start codon, for example, can completely abolish the expression of the gene. In some embodiments, the base editing may be performed at a site within an exon. In some embodiments, the base editing may be performed at a site on more than one exons. In some embodiments, the base editing may be performed at any exon of the multiple exons in a gene. In some embodiments, base editing may introduce a premature STOP codon into an exon, resulting in either lack of a translated product or in a truncated that may be misfolded and thereby eliminated by degradation, or may produce an unstable mRNA that is readily degraded. In some embodiments, the immune cell is a T cell. In some embodiments, the immune cell is a CAR-T cell. In some embodiments, the immune cell is a NK cell.

[0334] In some embodiments, an edited gene may be an immune response regulation gene, an immunogenic gene, a checkpoint inhibitor gene, a gene involved in immune responses, a cell surface marker, e.g. a T cell surface marker, or any combination thereof. In some embodiments, the edited gene is associated with activated T cell proliferation, alpha-beta T cell activation, gamma-delta T cell activation, positive regulation of T cell proliferation, negative regulation of T-helper cell proliferation or differentiation, or their regulatory elements thereof, or combinations thereof. In some embodiments, the edited gene may be a checkpoint inhibitor gene.

[0335] In some embodiments, the editing of the endogenous gene reduces expression of the gene. In some embodiments, the editing of the endogenous gene reduces expression of the gene by at least 50% as compared to a control cell without the modification. In some embodiments, the editing of the endogenous gene reduces expression of the gene by at least 60% as compared to a control cell without the modification. In some embodiments, the editing of the endogenous gene reduces expression of the gene by at least 70% as compared to a control cell without the modification. In some embodiments, the editing of the endogenous gene reduces expression of the gene by at least 80% as compared to a control cell without the modification. In some embodiments, the editing of the endogenous gene reduces expression of the gene by at least 90% as compared to a control cell without the modification. In some embodiments, the editing of the endogenous gene reduces expression of the gene by at least 100% as compared to a control cell without the modification. In some embodiments, the editing of the endogenous gene eliminates gene expression.

[0336] In some embodiments, base editing may be performed on an intron. For example, base editing may be performed on an intron. In some embodiments, the base editing may be performed at a site within an intron. In some embodiments, the base editing may be performed at a site one or more introns. In some embodiments, the base editing may be performed at any exon of the multiple introns in a gene. In some embodiments, one or more base editing may be performed on an exon, an intron or any combination of exons and introns.

[0337] In some embodiments, the modification or base edit may be within a promoter site. In some embodiments, the base edit may be introduced within an alternative promoter site. In some embodiments, the base edit may be in a 5′ regulatory element, such as an enhancer. In some embodiment, base editing may be introduced to disrupt the binding site of a nucleic acid binding protein. Exemplary nucleic acid binding proteins may be a polymerase, nuclease, gyrase, topoisomerase, methylase or methyl transferase, transcription factors, enhancer, PABP, zinc finger proteins, among many others.

[0338] In some embodiments, base editing may be used for splice disruption to silence target protein expression. In some embodiments, base editing may generate a splice acceptor-splice donor (SA-SD) site. Targeted base editing generating a SA-SD, or at a SA-SD site can result in reduced expression of a gene. In some embodiments, base editors (e.g., ABE, CBE) are used to target dinucleotide motifs that constitute splice acceptor and splice donor sites, which are the first and last two nucleotides of each intron. In some embodiments, splice disruption is achieved with an adenosine base editor (ABE). In some embodiments, splice disruption is achieved with a cytidine base editor (CBE). In some embodiments, base editors (e.g., ABE, CBE) are used to edit exons by creating STOP codons.

[0339] In some embodiments, provided herein is an immune cell with at least one modification in one or more endogenous genes. In some embodiments, the immune cell may have at least one modification in one, two, three, four, five, six, seven, eight, nine, ten, eleven, twelve, thirteen, fourteen, fifteen, sixteen, seventeen, eighteen, nineteen, twenty or more endogenous genes. In some embodiments, the modification generates a premature stop codon in the endogenous genes. In some embodiments, the STOP codon silences target protein expression. In some embodiments, the modification is a single base modification. In some embodiments, the modification is generated by base editing. The premature stop codon may be generated in an exon, an intron, or an untranslated region. In some embodiments, base editing may be used to introduce more than one STOP codon, in one or more alternative reading frames. In some embodiments, the stop codon is generated by a adenosine base editor (ABE). In some embodiments, the stop codon is generated by a cytidine base editor (CBE). In some embodiments, the CBE generates any one of the following edits (shown in underlined font) to generate a STOP codon: CAG→TAG; CAA→TAA; CGA→TGA; TGG→TGA; TGG→TAG; or TGG→TAA.

[0340] In some embodiments, the modification is a missense mutation. In some embodiments, the modification is in a peptide binding site, ATP binding site, splice site, promoter, enhancer, or in an untranslated region (UTR). In some embodiments, modification/base edits may be introduced at a 3′-UTR, for example, in a poly adenylation (poly-A) site. In some embodiments, base editing may be performed on a 5′-UTR region.

### Nucleobase Editors

[0341] Useful in the methods and compositions described herein are nucleobase editors that edit, modify or alter a target nucleotide sequence of a polynucleotide. Nucleobase editors described herein typically include a polynucleotide programmable nucleotide binding domain and a nucleobase editing domain (e.g., adenosine deaminase, cytidine deaminase, or a dual deaminase). A polynucleotide programmable nucleotide binding domain, when in conjunction with a bound guide polynucleotide (e.g., gRNA), can specifically bind to a target polynucleotide sequence and thereby localize the base editor to the target nucleic acid sequence desired to be edited.

[0342] In certain embodiments, the nucleobase editors provided herein comprise one or more features that improve base editing activity. For example, any of the nucleobase editors provided herein may comprise a Cas9 domain that has reduced nuclease activity. In some embodiments, any of the nucleobase editors provided herein may have a Cas9 domain that does not have nuclease activity (dCas9), or a Cas9 domain that cuts one strand of a duplexed DNA molecule, referred to as a Cas9 nickase (nCas9). Without wishing to be bound by any particular theory, the presence of the catalytic residue (e.g., H840) maintains the activity of the Cas9 to cleave the non-edited (e.g., non-deaminated) strand opposite the targeted nucleobase. Mutation of the catalytic residue (e.g., D10 to A10) prevents cleavage of the edited (e.g., deaminated) strand containing the targeted residue (e.g., A or C). Such Cas9 variants can generate a single-strand DNA break (nick) at a specific location based on the gRNA-defined target sequence, leading to repair of the non-edited strand, ultimately resulting in a nucleobase change on the non-edited strand.

### Polynucleotide Programmable Nucleotide Binding Domain

[0343] Polynucleotide programmable nucleotide binding domains bind polynucleotides (e.g., RNA, DNA). A polynucleotide programmable nucleotide binding domain of a base editor can itself comprise one or more domains (e.g., one or more nuclease domains). In some embodiments, the nuclease domain of a polynucleotide programmable nucleotide binding domain comprises an endonuclease or an exonuclease. An endonuclease can cleave a single strand of a double-stranded nucleic acid or both strands of a double-stranded nucleic acid molecule. In some embodiments, a nuclease domain of a polynucleotide programmable nucleotide binding domain can cut zero, one, or two strands of a target polynucleotide.

[0344] Non-limiting examples of a polynucleotide programmable nucleotide binding domain which can be incorporated into a base editor include a CRISPR protein-derived domain, a restriction nuclease, a meganuclease, TAL nuclease (TALEN), and a zinc finger nuclease (ZFN). In some embodiments, a base editor comprises a polynucleotide programmable nucleotide binding domain comprising a natural or modified protein or portion thereof which via a bound guide nucleic acid is capable of binding to a nucleic acid sequence during CRISPR (i.e., Clustered Regularly Interspaced Short Palindromic Repeats)-mediated modification of a nucleic acid. Such a protein is referred to herein as a “CRISPR protein.” Accordingly, disclosed herein is a base editor comprising a polynucleotide programmable nucleotide binding domain comprising all or a portion (e.g., a functional portion) of a CRISPR protein (i.e. a base editor comprising as a domain all or a portion (e.g., a functional portion) of a CRISPR protein, also referred to as a “CRISPR protein-derived domain” of the base editor). A CRISPR protein-derived domain incorporated into a base editor can be modified compared to a wild-type or natural version of the CRISPR protein. For example, as described below a CRISPR protein-derived domain can comprise one or more mutations, insertions, deletions, rearrangements and/or recombinations relative to a wild-type or natural version of the CRISPR protein.

[0345] Cas proteins that can be used herein include class 1 and class 2. Non-limiting examples of Cas proteins include Cas1, Cas1B, Cas2, Cas3, Cas4, Cas5, Cas5d, Cas5t, Cas5h, Cas5a, Cas6, Cas7, Cas8, Cas9 (also known as Csn1 or Csx12), Cas10, Csy1, Csy2, Csy3, Csy4, Cse1, Cse2, Cse3, Cse4, Cse5e, Csc1, Csc2, Csa5, Csn1, Csn2, Csm1, Csm2, Csm3, Csm4, Csm5, Csm6, Cmr1, Cmr3, Cmr4, Cmr5, Cmr6, Csb1, Csb2, Csb3, Csx17, Csx14, Csx10, Csx16, CsaX, Csx3, Csx1, Csx1S, Csf1, Csf2, CsO, Csf4, Csd1, Csd2, Cst1, Cst2, Csh1, Csh2, Csa1, Csa2, Csa3, Csa4, Csa5, Cas12a/Cpf1, Cas12b/C2cl (e.g., SEQ ID NO: 232), Cas12c/C2c3, Cas12d/CasY, Cas12e/CasX, Cas12g, Cas12h, Cas12i, and Cas12j/CasΦ, CARF, DinG, homologues thereof, or modified versions thereof. A CRISPR enzyme can direct cleavage of one or both strands at a target sequence, such as within a target sequence and/or within a complement of a target sequence. For example, a CRISPR enzyme can direct cleavage of one or both strands within about 1, 2, 3, 4, 5, 6, 7, 8, 9, 10, 15, 20, 25, 50, 100, 200, 500, or more base pairs from the first or last nucleotide of a target sequence.

[0346] A vector that encodes a CRISPR enzyme that is mutated to with respect, to a corresponding wild-type enzyme such that the mutated CRISPR enzyme lacks the ability to cleave one or both strands of a target polynucleotide containing a target sequence can be used. A Cas protein (e.g., Cas9, Cas12) or a Cas domain (e.g., Cas9, Cas12) can refer to a polypeptide or domain with at least or at least about 50%, 60%, 70%, 80%, 90%, 91%, 92%, 93%, 94%, 95%, 96%, 97%, 98%, 99%, or 100% sequence identity and/or sequence homology to a wild-type exemplary Cas polypeptide or Cas domain. Cas (e.g., Cas9, Cas12) can refer to the wild-type or a modified form of the Cas protein that can comprise an amino acid change such as a deletion, insertion, substitution, variant, mutation, fusion, chimera, or any combination thereof.

[0347] In some embodiments, a CRISPR protein-derived domain of a base editor can include all or a portion (e.g., a functional portion) of Cas9 from Corynebacterium ulcerans (NCBI Refs: NC_015683.1, NC_017317.1); Corynebacterium diphtheria (NCBI Refs: NC_016782.1, NC_016786.1); Spiroplasma syrphidicola (NCBI Ref: NC_021284.1); Prevotella intermedia (NCBI Ref: NC_017861.1); Spiroplasma taiwanense (NCBI Ref: NC_021846.1); Streptococcus iniae (NCBI Ref: NC_021314.1); Belliella baltica (NCBI Ref: NC_018010.1); Psychroflexus torquis (NCBI Ref: NC_018721.1); Streptococcus thermophilus (NCBI Ref: YP_820832.1); Listeria innocua (NCBI Ref: NP_472073.1); Campylobacter jejuni (NCBI Ref: YP_002344900.1); Neisseria meningitidis (NCBI Ref: YP_002342100.1), Streptococcus pyogenes, or Staphylococcus aureus.

[0348] Cas9 nuclease sequences and structures are well known to those of skill in the art (See, e.g., “Complete genome sequence of an Ml strain of Streptococcus pyogenes.” Ferretti et al., Proc. Natl. Acad. Sci. U.S.A. 98:4658-4663(2001); “CRISPR RNA maturation by trans-encoded small RNA and host factor RNase III.” Deltcheva E., et al., Nature 471:602-607(2011); and “A programmable dual-RNA-guided DNA endonuclease in adaptive bacterial immunity.” Jinek M., et al., Science 337:816-821(2012), the entire contents of each of which are incorporated herein by reference). Cas9 orthologs have been described in various species, including, but not limited to, S. pyogenes and S. thermophilus. Additional suitable Cas9 nucleases and sequences will be apparent to those of skill in the art based on this disclosure, and such Cas9 nucleases and sequences include Cas9 sequences from the organisms and loci disclosed in Chylinski, Rhun, and Charpentier, “The tracrRNA and Cas9 families of type II CRISPR-Cas immunity systems” (2013) RNA Biology 10:5, 726-737; the entire contents of which are incorporated herein by reference.

### High Fidelity Cas9 Domains

[0349] Some aspects of the disclosure provide high fidelity Cas9 domains. High fidelity Cas9 domains are known in the art and described, for example, in Kleinstiver, B. P., et al. “High-fidelity CRISPR-Cas9 nucleases with no detectable genome-wide off-target effects.” Nature 529, 490-495 (2016); and Slaymaker, I. M., et al. “Rationally engineered Cas9 nucleases with improved specificity.” Science 351, 84-88 (2015); the entire contents of each of which are incorporated herein by reference. An Exemplary high fidelity Cas9 domain is provided in the Sequence Listing as SEQ ID NO: 233. In some embodiments, high fidelity Cas9 domains are engineered Cas9 domains comprising one or more mutations that decrease electrostatic interactions between the Cas9 domain and the sugar-phosphate backbone of a DNA, relative to a corresponding wild-type Cas9 domain. High fidelity Cas9 domains that have decreased electrostatic interactions with the sugar-phosphate backbone of DNA have less off-target effects. In some embodiments, the Cas9 domain (e.g., a wild type Cas9 domain (SEQ ID NOs: 197 and 200)) comprises one or more mutations that decrease the association between the Cas9 domain and the sugar-phosphate backbone of a DNA. In some embodiments, a Cas9 domain comprises one or more mutations that decreases the association between the Cas9 domain and the sugar-phosphate backbone of DNA by at least 1%, at least 2%, at least 3%, at least 4%, at least 5%, at least 10%, at least 15%, at least 20%, at least 25%, at least 30%, at least 35%, at least 40%, at least 45%, at least 50%, at least 55%, at least 60%, at least 65%, or at least 70%.

[0350] In some embodiments, any of the Cas9 fusion proteins or complexes provided herein comprise one or more of a D10A, N497X, a R661X, a Q695X, and/or a Q926X mutation, or a corresponding mutation in any of the amino acid sequences provided herein, wherein X is any amino acid. In some embodiments, the high fidelity Cas9 enzyme is SpCas9 (K855A), eSpCas9(1.1), SpCas9-HF1, or hyper accurate Cas9 variant (HypaCas9). In some embodiments, the modified Cas9 eSpCas9(1.1) contains alanine substitutions that weaken the interactions between the HNH/RuvC groove and the non-target DNA strand, preventing strand separation and cutting at off-target sites. Similarly, SpCas9-HF1 lowers off-target editing through alanine substitutions that disrupt Cas9's interactions with the DNA phosphate backbone. HypaCas9 contains mutations (SpCas9 N692A/M694A/Q695A/H698A) in the REC3 domain that increase Cas9 proofreading and target discrimination. All three high fidelity enzymes generate less off-target editing than wildtype Cas9.

Cas9 Domains with Reduced Exclusivity

[0351] Typically, Cas9 proteins, such as Cas9 from S. pyogenes (spCas9), require a “protospacer adjacent motif (PAM)” or PAM-like motif, which is a 2-6 base pair DNA sequence immediately following the DNA sequence targeted by the Cas9 nuclease in the CRISPR bacterial adaptive immune system. The presence of an NGG PAM sequence is required to bind a particular nucleic acid region, where the “N” in “NGG” is adenosine (A), thymidine (T), or cytosine (C), and the G is guanosine. This may limit the ability to edit desired bases within a genome. In some embodiments, the base editing fusion proteins or complexes provided herein may need to be placed at a precise location, for example a region comprising a target base that is upstream of the PAM. See e.g., Komor, A. C., et al., “Programmable editing of a target base in genomic DNA without double-stranded DNA cleavage” Nature 533, 420-424 (2016), the entire contents of which are hereby incorporated by reference. Exemplary polypeptide sequences for spCas9 proteins capable of binding a PAM sequence are provided in the Sequence Listing as SEQ ID NOs: 197, 201, and 234-237. Accordingly, in some embodiments, any of the fusion proteins or complexes provided herein may contain a Cas9 domain that is capable of binding a nucleotide sequence that does not contain a canonical (e.g., NGG) PAM sequence. Cas9 domains that bind to non-canonical PAM sequences have been described in the art and would be apparent to the skilled artisan. For example, Cas9 domains that bind non-canonical PAM sequences have been described in Kleinstiver, B. P., et al., “Engineered CRISPR-Cas9 nucleases with altered PAM specificities” Nature 523, 481-485 (2015); and Kleinstiver, B. P., et al., “Broadening the targeting range of Staphylococcus aureus CRISPR-Cas9 by modifying PAM recognition” Nature Biotechnology 33, 1293-1298 (2015); the entire contents of each are hereby incorporated by reference.

### Nickases

[0352] In some embodiments, the polynucleotide programmable nucleotide binding domain comprises a nickase domain. Herein the term “nickase” refers to a polynucleotide programmable nucleotide binding domain comprising a nuclease domain that is capable of cleaving only one strand of the two strands in a duplexed nucleic acid molecule (e.g., DNA). In some embodiments, a nickase can be derived from a fully catalytically active (e.g., natural) form of a polynucleotide programmable nucleotide binding domain by introducing one or more mutations into the active polynucleotide programmable nucleotide binding domain. For example, where a polynucleotide programmable nucleotide binding domain comprises a nickase domain derived from Cas9, the Cas9-derived nickase domain can include a D10A mutation and a histidine at position 840. In such embodiments, the residue H840 retains catalytic activity and can thereby cleave a single strand of the nucleic acid duplex. In another example, a Cas9-derived nickase domain comprises an H840A mutation, while the amino acid residue at position 10 remains a D. In some embodiments, a nickase can be derived from a fully catalytically active (e.g., natural) form of a polynucleotide programmable nucleotide binding domain by removing all or a portion (e.g., a functional portion) of a nuclease domain that is not required for the nickase activity. For example, where a polynucleotide programmable nucleotide binding domain comprises a nickase domain derived from Cas9, the Cas9-derived nickase domain comprises a deletion of all or a portion (e.g., a functional portion) of the RuvC domain or the HNH domain.

[0353] In some embodiments, wild-type Cas9 corresponds to, or comprises the following amino acid sequence:

(SEQ ID NO: 197)
MDKKYSIGLDIGTNSVGWAVITDEYKVPSKKFKVLGNTDRHSIKKNLIG
ALLFDSGETAEATRLKRTARRRYTRRKNRICYLQEIFSNEMAKVDDSFF
HRLEESFLVEEDKKHERHPIFGNIVDEVAYHEKYPTIYHLRKKLVDSTD
KADLRLIYLALAHMIKFRGHFLIEGDLNPDNSDVDKLFIQLVQTYNQLF
EENPINASGVDAKAILSARLSKSRRLENLIAQLPGEKKNGLFGNLIALS
LGLTPNFKSNFDLAEDAKLQLSKDTYDDDLDNLLAQIGDQYADLFLAAK
NLSDAILLSDILRVNTEITKAPLSASMIKRYDEHHQDLTLLKALVRQQL
PEKYKEIFFDQSKNGYAGYIDGGASQEEFYKFIKPILEKMDGTEELLVK
LNREDLLRKQRTFDNGSIPHQIHLGELHAILRRQEDFYPFLKDNREKIE
KILTFRIPYYVGPLARGNSRFAWMTRKSEETITPWNFEEVVDKGASAQS
FIERMTNFDKNLPNEKVLPKHSLLYEYFTVYNELTKVKYVTEGMRKPAF
LSGEQKKAIVDLLFKTNRKVTVKQLKEDYFKKIECFDSVEISGVEDRFN
ASLGTYHDLLKIIKDKDFLDNEENEDILEDIVLTLTLFEDREMIEERLK
TYAHLFDDKVMKQLKRRRYTGWGRLSRKLINGIRDKQSGKTILDFLKSD
GFANRNFMQLIHDDSLTFKEDIQKAQVSGQGDSLHEHIANLAGSPAIKK
GILOTVKVVDELVKVMGRHKPENIVIEMARENQTTQKGQKNSRERMKRI
EEGIKELGSQILKEHPVENTQLQNEKLYLYYLQNGRDMYVDQELDINRL
SDYDVDHIVPQSFLKDDSIDNKVLTRSDKNRGKSDNVPSEEVVKKMKNY
WRQLLNAKLITQRKFDNLTKAERGGLSELDKAGFIKROLVETROITKHV
AQILDSRMNTKYDENDKLIREVKVITLKSKLVSDFRKDFQFYKVREINN
YHHAHDAYLNAVVGTALIKKYPKLESEFVYGDYKVYDVRKMIAKSEQEI
GKATAKYFFYSNIMNFFKTEITLANGEIRKRPLIETNGETGEIVWDKGR
DFATVRKVLSMPQVNIVKKTEVQTGGFSKESILPKRNSDKLIARKKDWD
PKKYGGFDSPTVAYSVLVVAKVEKGKSKKLKSVKELLGITIMERSSFEK
NPIDFLEAKGYKEVKKDLIIKLPKYSLFELENGRKRMLASAGELQKGNE
LALPSKYVNFLYLASHYEKLKGSPEDNEQKQLFVEQHKHYLDEIIEQIS
EFSKRVILADANLDKVLSAYNKHRDKPIREQAENIIHLFTLTNLGAPAA
FKYFDTTIDRKRYTSTKEVLDATLIHQSITGLYETRIDLSQLGGD
(single underline: HNH domain; double underline:
RuvC domain).

[0354] In some embodiments, the strand of a nucleic acid duplex target polynucleotide sequence that is cleaved by a base editor comprising a nickase domain (e.g., Cas9-derived nickase domain, Cas12-derived nickase domain) is the strand that is not edited by the base editor (i.e., the strand that is cleaved by the base editor is opposite to a strand comprising a base to be edited). In other embodiments, a base editor comprising a nickase domain (e.g., Cas9-derived nickase domain, Cas12-derived nickase domain) can cleave the strand of a DNA molecule which is being targeted for editing. In such embodiments, the non-targeted strand is not cleaved.

[0355] In some embodiments, a Cas9 nuclease has an inactive (e.g., an inactivated) DNA cleavage domain, that is, the Cas9 is a nickase, referred to as an “nCas9” protein (for “nickase” Cas9). The Cas9 nickase may be a Cas9 protein that is capable of cleaving only one strand of a duplexed nucleic acid molecule (e.g., a duplexed DNA molecule). In some embodiments the Cas9 nickase cleaves the target strand of a duplexed nucleic acid molecule, meaning that the Cas9 nickase cleaves the strand that is base paired to (complementary to) a gRNA (e.g., an sgRNA) that is bound to the Cas9. In some embodiments, a Cas9 nickase comprises a D10A mutation and has a histidine at position 840. In some embodiments the Cas9 nickase cleaves the non-target, non-base-edited strand of a duplexed nucleic acid molecule, meaning that the Cas9 nickase cleaves the strand that is not base paired to a gRNA (e.g., an sgRNA) that is bound to the Cas9. In some embodiments, a Cas9 nickase comprises an H840A mutation and has an aspartic acid residue at position 10, or a corresponding mutation. In some embodiments the Cas9 nickase comprises an amino acid sequence that is at least 60%, at least 65%, at least 70%, at least 75%, at least 80%, at least 85%, at least 90%, at least 95%, at least 96%, at least 97%, at least 98%, at least 99%, or at least 99.5% identical to any one of the Cas9 nickases provided herein. Additional suitable Cas9 nickases will be apparent to those of skill in the art based on this disclosure and knowledge in the field, and are within the scope of this disclosure.

[0356] The amino acid sequence of an exemplary catalytically Cas9 nickase (nCas9) is as follows:

(SEQ ID NO: 201)
MDKKYSIGLAIGTNSVGWAVITDEYKVPSKKFKVLGNTDRHSIKKNLIG
ALLFDSGETAEATRLKRTARRRYTRRKNRICYLQEIFSNEMAKVDDSFF
HRLEESFLVEEDKKHERHPIFGNIVDEVAYHEKYPTIYHLRKKLVDSTD
KADLRLIYLALAHMIKFRGHFLIEGDLNPDNSDVDKLFIQLVQTYNQLF
EENPINASGVDAKAILSARLSKSRRLENLIAQLPGEKKNGLFGNLIALS
LGLTPNFKSNFDLAEDAKLQLSKDTYDDDLDNLLAQIGDQYADLFLAAK
NLSDAILLSDILRVNTEITKAPLSASMIKRYDEHHQDLTLLKALVRQQL
PEKYKEIFFDQSKNGYAGYIDGGASQEEFYKFIKPILEKMDGTEELLVK
LNREDLLRKQRTFDNGSIPHQIHLGELHAILRRQEDFYPFLKDNREKIE
KILTFRIPYYVGPLARGNSRFAWMTRKSEETITPWNFEEVVDKGASAQS
FIERMTNFDKNLPNEKVLPKHSLLYEYFTVYNELTKVKYVTEGMRKPAF
LSGEQKKAIVDLLFKTNRKVTVKQLKEDYFKKIECFDSVEISGVEDRFN
ASLGTYHDLLKIIKDKDFLDNEENEDILEDIVLTLTLFEDREMIEERLK
TYAHLFDDKVMKQLKRRRYTGWGRLSRKLINGIRDKQSGKTILDFLKSD
GFANRNFMQLIHDDSLTFKEDIQKAQVSGQGDSLHEHIANLAGSPAIKK
GILQTVKVVDELVKVMGRHKPENIVIEMARENQTTQKGQKNSRERMKRI
EEGIKELGSQILKEHPVENTQLQNEKLYLYYLQNGRDMYVDQELDINRL
SDYDVDHIVPQSFLKDDSIDNKVLTRSDKNRGKSDNVPSEEVVKKMKNY
WRQLLNAKLITQRKFDNLTKAERGGLSELDKAGFIKRQLVETRQITKHV
AQILDSRMNTKYDENDKLIREVKVITLKSKLVSDFRKDFQFYKVREINN
YHHAHDAYLNAVVGTALIKKYPKLESEFVYGDYKVYDVRKMIAKSEQEI
GKATAKYFFYSNIMNFFKTEITLANGEIRKRPLIETNGETGEIVWDKGR
DFATVRKVLSMPQVNIVKKTEVQTGGFSKESILPKRNSDKLIARKKDWD
PKKYGGFDSPTVAYSVLVVAKVEKGKSKKLKSVKELLGITIMERSSFEK
NPIDFLEAKGYKEVKKDLIIKLPKYSLFELENGRKRMLASAGELQKGNE
LALPSKYVNFLYLASHYEKLKGSPEDNEQKQLFVEQHKHYLDEIIEQIS
EFSKRVILADANLDKVLSAYNKHRDKPIREQAENIIHLFTLTNLGAPAA
FKYFDTTIDRKRYTSTKEVLDATLIHQSITGLYETRIDLSQLGGD

[0357] The Cas9 nuclease has two functional endonuclease domains: RuvC and HNH. Cas9 undergoes a conformational change upon target binding that positions the nuclease domains to cleave opposite strands of the target DNA. The end result of Cas9-mediated DNA cleavage is a double-strand break (DSB) within the target DNA (˜3-4 nucleotides upstream of the PAM sequence). The resulting DSB is then repaired by one of two general repair pathways: (1) the efficient but error-prone non-homologous end joining (NHEJ) pathway; or (2) the less efficient but high-fidelity homology directed repair (HDR) pathway.

[0358] The “efficiency” of non-homologous end joining (NHEJ) and/or homology directed repair (HDR) can be calculated by any convenient method. For example, in some embodiments, efficiency can be expressed in terms of percentage of successful HDR. For example, a surveyor nuclease assay can be used to generate cleavage products and the ratio of products to substrate can be used to calculate the percentage. For example, a surveyor nuclease enzyme can be used that directly cleaves DNA containing a newly integrated restriction sequence as the result of successful HDR. More cleaved substrate indicates a greater percent HDR (a greater efficiency of HDR). As an illustrative example, a fraction (percentage) of HDR can be calculated using the following equation [(cleavage products)/(substrate plus cleavage products)] (e.g., (b+c)/(a+b+c), where “a” is the band intensity of DNA substrate and “b” and “c” are the cleavage products).

[0359] In some embodiments, efficiency can be expressed in terms of percentage of successful NHEJ. For example, a T7 endonuclease I assay can be used to generate cleavage products and the ratio of products to substrate can be used to calculate the percentage NHEJ. T7 endonuclease I cleaves mismatched heteroduplex DNA which arises from hybridization of wild-type and mutant DNA strands (NHEJ generates small random insertions or deletions (indels) at the site of the original break). More cleavage indicates a greater percent NHEJ (a greater efficiency of NHEJ). As an illustrative example, a fraction (percentage) of NHEJ can be calculated using the following equation: (1−(1−(b+c)/(a+b+c))^{1/2})×100, where “a” is the band intensity of DNA substrate and “b” and “c” are the cleavage products (Ran et. al., Cell. 2013 Sep. 12; 154(6):1380-9; and Ran et al., Nat Protoc. 2013 November; 8(11): 2281-2308).

[0360] The NHEJ repair pathway is the most active repair mechanism, and it frequently causes small nucleotide insertions or deletions (indels) at the DSB site. The randomness of NHEJ-mediated DSB repair has important practical implications, because a population of cells expressing Cas9 and a gRNA or a guide polynucleotide can result in a diverse array of mutations. In most embodiments, NHEJ gives rise to small indels in the target DNA that result in amino acid deletions, insertions, or frameshift mutations leading to premature stop codons within the open reading frame (ORF) of the targeted gene. The ideal end result is a loss-of-function mutation within the targeted gene.

[0361] While NHEJ-mediated DSB repair often disrupts the open reading frame of the gene, homology directed repair (HDR) can be used to generate specific nucleotide changes ranging from a single nucleotide change to large insertions like the addition of a fluorophore or tag.

[0362] In order to utilize HDR for gene editing, a DNA repair template containing the desired sequence can be delivered into the cell type of interest with the gRNA(s) and Cas9 or Cas9 nickase. The repair template can contain the desired edit as well as additional homologous sequence immediately upstream and downstream of the target (termed left & right homology arms). The length of each homology arm can be dependent on the size of the change being introduced, with larger insertions requiring longer homology arms. The repair template can be a single-stranded oligonucleotide, double-stranded oligonucleotide, or a double-stranded DNA plasmid. The efficiency of HDR is generally low (<10% of modified alleles) even in cells that express Cas9, gRNA and an exogenous repair template. The efficiency of HDR can be enhanced by synchronizing the cells, since HDR takes place during the S and G2 phases of the cell cycle. Chemically or genetically inhibiting genes involved in NHEJ can also increase HDR frequency.

[0363] In some embodiments, Cas9 is a modified Cas9. A given gRNA targeting sequence can have additional sites throughout the genome where partial homology exists. These sites are called off-targets and need to be considered when designing a gRNA. In addition to optimizing gRNA design, CRISPR specificity can also be increased through modifications to Cas9. Cas9 generates double-strand breaks (DSBs) through the combined activity of two nuclease domains, RuvC and HNH. Cas9 nickase, a D10A mutant of SpCas9, retains one nuclease domain and generates a DNA nick rather than a DSB. The nickase system can also be combined with HDR-mediated gene editing for specific gene edits.

### Catalytically Dead Nucleases

[0364] Also provided herein are base editors comprising a polynucleotide programmable nucleotide binding domain which is catalytically dead (i.e., incapable of cleaving a target polynucleotide sequence). Herein the terms “catalytically dead” and “nuclease dead” are used interchangeably to refer to a polynucleotide programmable nucleotide binding domain which has one or more mutations and/or deletions resulting in its inability to cleave a strand of a nucleic acid. In some embodiments, a catalytically dead polynucleotide programmable nucleotide binding domain base editor can lack nuclease activity as a result of specific point mutations in one or more nuclease domains. For example, in the case of a base editor comprising a Cas9 domain, the Cas9 can comprise both a D10A mutation and an H840A mutation. Such mutations inactivate both nuclease domains, thereby resulting in the loss of nuclease activity. In other embodiments, a catalytically dead polynucleotide programmable nucleotide binding domain comprises one or more deletions of all or a portion (e.g., a functional portion) of a catalytic domain (e.g., RuvC1 and/or HNH domains). In further embodiments, a catalytically dead polynucleotide programmable nucleotide binding domain comprises a point mutation (e.g., D10A or H840A) as well as a deletion of all or a portion (e.g., a functional portion) of a nuclease domain. dCas9 domains are known in the art and described, for example, in Qi et al., “Repurposing CRISPR as an RNA-guided platform for sequence-specific control of gene expression.” Cell. 2013; 152(5):1173-83, the entire contents of which are incorporated herein by reference.

[0365] Additional suitable nuclease-inactive dCas9 domains will be apparent to those of skill in the art based on this disclosure and knowledge in the field, and are within the scope of this disclosure. Such additional exemplary suitable nuclease-inactive Cas9 domains include, but are not limited to, D10A/H840A, D10A/D839A/H840A, and D10A/D839A/H840A/N863A mutant domains (See, e.g., Prashant et al., CAS9 transcriptional activators for target specificity screening and paired nickases for cooperative genome engineering. Nature Biotechnology. 2013; 31(9): 833-838, the entire contents of which are incorporated herein by reference).

[0366] In some embodiments, dCas9 corresponds to, or comprises in part or in whole, a Cas9 amino acid sequence having one or more mutations that inactivate the Cas9 nuclease activity. In some embodiments, the nuclease-inactive dCas9 domain comprises a D10X mutation and a H840X mutation of the amino acid sequence set forth herein, or a corresponding mutation in any of the amino acid sequences provided herein, wherein X is any amino acid change. In some embodiments, the nuclease-inactive dCas9 domain comprises a D10A mutation and a H840A mutation of the amino acid sequence set forth herein, or a corresponding mutation in any of the amino acid sequences provided herein. In some embodiments, a nuclease-inactive Cas9 domain comprises the amino acid sequence set forth in Cloning vector pPlatTET-gRNA2 (Accession No. BAV54124).

[0367] In some embodiments, a variant Cas9 protein can cleave the complementary strand of a guide target sequence but has reduced ability to cleave the non-complementary strand of a double stranded guide target sequence. For example, the variant Cas9 protein can have a mutation (amino acid substitution) that reduces the function of the RuvC domain. As a non-limiting example, in some embodiments, a variant Cas9 protein has a D10A (aspartate to alanine at amino acid position 10) and can therefore cleave the complementary strand of a double stranded guide target sequence but has reduced ability to cleave the non-complementary strand of a double stranded guide target sequence (thus resulting in a single strand break (SSB) instead of a double strand break (DSB) when the variant Cas9 protein cleaves a double stranded target nucleic acid) (see, for example, Jinek et al., Science. 2012 Aug. 17; 337(6096):816-21).

[0368] In some embodiments, a variant Cas9 protein can cleave the non-complementary strand of a double stranded guide target sequence but has reduced ability to cleave the complementary strand of the guide target sequence. For example, the variant Cas9 protein can have a mutation (amino acid substitution) that reduces the function of the HNH domain (RuvC/HNH/RuvC domain motifs). As a non-limiting example, in some embodiments, the variant Cas9 protein has an H840A (histidine to alanine at amino acid position 840) mutation and can therefore cleave the non-complementary strand of the guide target sequence but has reduced ability to cleave the complementary strand of the guide target sequence (thus resulting in a SSB instead of a DSB when the variant Cas9 protein cleaves a double stranded guide target sequence). Such a Cas9 protein has a reduced ability to cleave a guide target sequence (e.g., a single stranded guide target sequence) but retains the ability to bind a guide target sequence (e.g., a single stranded guide target sequence).

[0369] As another non-limiting example, in some embodiments, the variant Cas9 protein harbors W476A and W1126A mutations such that the polypeptide has a reduced ability to cleave a target DNA. Such a Cas9 protein has a reduced ability to cleave a target DNA (e.g., a single stranded target DNA) but retains the ability to bind a target DNA (e.g., a single stranded target DNA).

[0370] As another non-limiting example, in some embodiments, the variant Cas9 protein harbors P475A, W476A, N477A, D1125A, W1126A, and D1127A mutations such that the polypeptide has a reduced ability to cleave a target DNA. Such a Cas9 protein has a reduced ability to cleave a target DNA (e.g., a single stranded target DNA) but retains the ability to bind a target DNA (e.g., a single stranded target DNA).

[0371] As another non-limiting example, in some embodiments, the variant Cas9 protein harbors H840A, W476A, and W1126A, mutations such that the polypeptide has a reduced ability to cleave a target DNA. Such a Cas9 protein has a reduced ability to cleave a target DNA (e.g., a single stranded target DNA) but retains the ability to bind a target DNA (e.g., a single stranded target DNA). As another non-limiting example, in some embodiments, the variant Cas9 protein harbors H840A, D10A, W476A, and W1126A, mutations such that the polypeptide has a reduced ability to cleave a target DNA. Such a Cas9 protein has a reduced ability to cleave a target DNA (e.g., a single stranded target DNA) but retains the ability to bind a target DNA (e.g., a single stranded target DNA). In some embodiments, the variant Cas9 has restored catalytic His residue at position 840 in the Cas9 HNH domain (A840H).

[0372] As another non-limiting example, in some embodiments, the variant Cas9 protein harbors, H840A, P475A, W476A, N477A, D1125A, W1126A, and D1127A mutations such that the polypeptide has a reduced ability to cleave a target DNA. Such a Cas9 protein has a reduced ability to cleave a target DNA (e.g., a single stranded target DNA) but retains the ability to bind a target DNA (e.g., a single stranded target DNA). As another non-limiting example, in some embodiments, the variant Cas9 protein harbors D10A, H840A, P475A, W476A, N477A, D1125A, W1126A, and D1127A mutations such that the polypeptide has a reduced ability to cleave a target DNA. Such a Cas9 protein has a reduced ability to cleave a target DNA (e.g., a single stranded target DNA) but retains the ability to bind a target DNA (e.g., a single stranded target DNA). In some embodiments, when a variant Cas9 protein harbors W476A and W1126A mutations or when the variant Cas9 protein harbors P475A, W476A, N477A, D1125A, W1126A, and D1127A mutations, the variant Cas9 protein does not bind efficiently to a PAM sequence. Thus, in some such embodiments, when such a variant Cas9 protein is used in a method of binding, the method does not require a PAM sequence. In other words, in some embodiments, when such a variant Cas9 protein is used in a method of binding, the method can include a guide RNA, but the method can be performed in the absence of a PAM sequence (and the specificity of binding is therefore provided by the targeting segment of the guide RNA). Other residues can be mutated to achieve the above effects (i.e., inactivate one or the other nuclease portions). As non-limiting examples, residues D10, G12, G17, E762, H840, N854, N863, H982, H983, A984, D986, and/or A987 can be altered (i.e., substituted). Also, mutations other than alanine substitutions are suitable.

[0373] In some embodiments, a variant Cas9 protein that has reduced catalytic activity (e.g., when a Cas9 protein has a D10, G12, G17, E762, H840, N854, N863, H982, H983, A984, D986, and/or a A987 mutation, e.g., D10A, G12A, G17A, E762A, H840A, N854A, N863A, H982A, H983A, A984A, and/or D986A), the variant Cas9 protein can still bind to target DNA in a site-specific manner (because it is still guided to a target DNA sequence by a guide RNA) as long as it retains the ability to interact with the guide RNA.

[0374] In some embodiments, the variant Cas protein can be spCas9, spCas9-VRQR, spCas9-VRER, xCas9 (sp), saCas9, saCas9-KKH, spCas9-MQKSER, spCas9-LRKIQK, or spCas9-LRVSQL.

[0375] In some embodiments, the Cas9 domain is a Cas9 domain from Staphylococcus aureus (SaCas9). In some embodiments, the SaCas9 domain is a nuclease active SaCas9, a nuclease inactive SaCas9 (SaCas9d), or a SaCas9 nickase (SaCas9n). In some embodiments, the SaCas9 comprises a N579A mutation, or a corresponding mutation in any of the amino acid sequences provided in the Sequence Listing submitted herewith.

[0376] In some embodiments, the SaCas9 domain, the SaCas9d domain, or the SaCas9n domain can bind to a nucleic acid sequence having a non-canonical PAM. In some embodiments, the SaCas9 domain, the SaCas9d domain, or the SaCas9n domain can bind to a nucleic acid sequence having a NNGRRT or a NNGRRV PAM sequence. In some embodiments, the SaCas9 domain comprises one or more of a E781X, a N967X, and a R1014X mutation, or a corresponding mutation in any of the amino acid sequences provided herein, wherein X is any amino acid. In some embodiments, the SaCas9 domain comprises one or more of a E781K, a N967K, and a R1014H mutation, or one or more corresponding mutation in any of the amino acid sequences provided herein. In some embodiments, the SaCas9 domain comprises a E781K, a N967K, or a R1014H mutation, or corresponding mutations in any of the amino acid sequences provided herein.

[0377] In some embodiments, one of the Cas9 domains present in the fusion protein or complexes may be replaced with a guide nucleotide sequence-programmable DNA-binding protein domain that has no requirements for a PAM sequence. In some embodiments, the Cas9 is an SaCas9. Residue A579 of SaCas9 can be mutated from N579 to yield a SaCas9 nickase. Residues K781, K967, and H1014 can be mutated from E781, N967, and R1014 to yield a SaKKH Cas9.

[0378] In some embodiments, a modified SpCas9 including amino acid substitutions D1135M, S1136Q, G1218K, E1219F, A1322R, D1332A, R1335E, and T1337R (SpCas9-MQKFRAER) and having specificity for the altered PAM 5′-NGC-3′ was used.

[0379] Alternatives to S. pyogenes Cas9 can include RNA-guided endonucleases from the Cpf1 family that display cleavage activity in mammalian cells. CRISPR from Prevotella and Francisella 1 (CRISPR/Cpf1) is a DNA-editing technology analogous to the CRISPR/Cas9 system. Cpf1 is an RNA-guided endonuclease of a class II CRISPR/Cas system. This acquired immune mechanism is found in Prevotella and Francisella bacteria. Cpf1 genes are associated with the CRISPR locus, coding for an endonuclease that use a guide RNA to find and cleave viral DNA. Cpf1 is a smaller and simpler endonuclease than Cas9, overcoming some of the CRISPR/Cas9 system limitations. Unlike Cas9 nucleases, the result of Cpf1-mediated DNA cleavage is a double-strand break with a short 3′ overhang. Cpf1's staggered cleavage pattern can open up the possibility of directional gene transfer, analogous to traditional restriction enzyme cloning, which can increase the efficiency of gene editing. Like the Cas9 variants and orthologues described above, Cpf1 can also expand the number of sites that can be targeted by CRISPR to AT-rich regions or AT-rich genomes that lack the NGG PAM sites favored by SpCas9. The Cpf1 locus contains a mixed alpha/beta domain, a RuvC-I followed by a helical region, a RuvC-II and a zinc finger-like domain. The Cpf1 protein has a RuvC-like endonuclease domain that is similar to the RuvC domain of Cas9.

[0380] Furthermore, Cpf1, unlike Cas9, does not have a HNH endonuclease domain, and the N-terminal of Cpf1 does not have the alpha-helical recognition lobe of Cas9. Cpf1 CRISPR-Cas domain architecture shows that Cpf1 is functionally unique, being classified as Class 2, type V CRISPR system. The Cpf1 loci encode Cas1, Cas2 and Cas4 proteins that are more similar to types I and III than type II systems. Functional Cpf1 does not require the trans-activating CRISPR RNA (tracrRNA), therefore, only CRISPR (crRNA) is required. This benefits genome editing because Cpf1 is not only smaller than Cas9, but also it has a smaller sgRNA molecule (approximately half as many nucleotides as Cas9). The Cpf1-crRNA complex cleaves target DNA or RNA by identification of a protospacer adjacent motif 5′-YTN-3′ or 5′-TTN-3′ in contrast to the G-rich PAM targeted by Cas9. After identification of PAM, Cpf1 introduces a sticky-end-like DNA double-stranded break having an overhang of 4 or 5 nucleotides.

[0381] In some embodiments, the Cas9 is a Cas9 variant having specificity for an altered PAM sequence. In some embodiments, the Additional Cas9 variants and PAM sequences are described in Miller, S. M., et al. Continuous evolution of SpCas9 variants compatible with non-G PAMs, Nat. Biotechnol. (2020), the entirety of which is incorporated herein by reference. in some embodiments, a Cas9 variate have no specific PAM requirements. In some embodiments, a Cas9 variant, e.g. a SpCas9 variant has specificity for a NRNH PAM, wherein R is A or G and H is A, C, or T. In some embodiments, the SpCas9 variant has specificity for a PAM sequence AAA, TAA, CAA, GAA, TAT, GAT, or CAC. In some embodiments, the SpCas9 variant comprises an amino acid substitution at position 1114, 1134, 1135, 1137, 1139, 1151, 1180, 1188, 1211, 1218, 1219, 1221, 1249, 1256, 1264, 1290, 1318, 1317, 1320, 1321, 1323, 1332, 1333, 1335, 1337, or 1339 or a corresponding position thereof. In some embodiments, the SpCas9 variant comprises an amino acid substitution at position 1114, 1135, 1218, 1219, 1221, 1249, 1320, 1321, 1323, 1332, 1333, 1335, or 1337 or a corresponding position thereof. In some embodiments, the SpCas9 variant comprises an amino acid substitution at position 1114, 1134, 1135, 1137, 1139, 1151, 1180, 1188, 1211, 1219, 1221, 1256, 1264, 1290, 1318, 1317, 1320, 1323, 1333 or a corresponding position thereof. In some embodiments, the SpCas9 variant comprises an amino acid substitution at position 1114, 1131, 1135, 1150, 1156, 1180, 1191, 1218, 1219, 1221, 1227, 1249, 1253, 1286, 1293, 1320, 1321, 1332, 1335, 1339 or a corresponding position thereof. In some embodiments, the SpCas9 variant comprises an amino acid substitution at position 1114, 1127, 1135, 1180, 1207, 1219, 1234, 1286, 1301, 1332, 1335, 1337, 1338, 1349 or a corresponding position thereof. Exemplary amino acid substitutions and PAM specificity of SpCas9 variants are shown in Tables 2A-2D).

TABLE 2A
SpCas9 Variants and PAM specificity

| | SpCas9 amino acid position | | | | | | | | | | | | |
|---|---|---|---|---|---|---|---|---|---|---|---|---|---|
| | 1114 | 1135 | 1218 | 1219 | 1221 | 1249 | 1320 | 1321 | 1323 | 1332 | 1333 | 1335 | 1337 |
| PAM | R | D | G | E | Q | P | A | P | A | D | R | R | T |
| AAA | | N | | V | H | | | | | | G | | |
| AAA | | N | | V | H | | | | | | G | | |
| AAA | | | | V | | | | | | | G | | |
| TAA | G | N | | V | | | | | | | I | | |
| TAA | | N | | V | | | | | | | I | | A |
| TAA | G | N | | V | | | | | | | I | | A |
| CAA | | | | V | | | | | | | K | | |
| CAA | | N | | V | | | | | | | K | | |
| CAA | | N | | V | | | | | | | K | | |
| GAA | | | | V | H | | V | | | | K | | |
| GAA | | N | | V | | | V | | | | K | | |
| GAA | | | | V | H | | V | | | | K | | |
| TAT | | | S | V | H | S | | S | | | | L | |
| TAT | | | S | V | H | S | | S | | | | L | |
| TAT | | | S | V | H | S | | S | | | | L | |
| GAT | | | | V | | | | | | | I | | |
| GAT | | | | V | | | | | D | | | Q | |
| GAT | | | | V | | | | | D | | | Q | |
| CAC | | | | V | | | | | | N | | Q | N |
| CAC | | N | | V | | | | | | | | Q | N |
| CAC | | | | V | | | | | | N | | Q | N |

TABLE 2B
SpCas9 Variants and PAM specificity

| | SpCas9 amino acid position | | | | | | | | | | | | | | | | | | |
|---|---|---|---|---|---|---|---|---|---|---|---|---|---|---|---|---|---|---|---|
| | 1114 | 1134 | 1135 | 1137 | 1139 | 1151 | 1180 | 1188 | 1211 | 1219 | 1221 | 1256 | 1264 | 1290 | 1318 | 1317 | 1320 | 1323 | 1333 |
| PAM | R | F | D | P | V | K | D | K | K | E | Q | Q | H | V | L | N | A | A | R |
| GAA | | | | | | | | | | V | H | | | | | | V | | K |
| GAA | | | N | S | | | | | | V | | | | | | | V | D | K |
| GAA | | | N | | | | | | | V | H | | Y | | | | V | | K |
| CAA | | | N | | | | | | | V | H | | Y | | | | V | | K |
| CAA | G | | N | S | | | | | | V | H | | Y | | | | V | | K |
| CAA | | | N | | | | | R | | V | H | | | | | | V | | K |
| CAA | | | N | | | | G | | R | V | H | | Y | | | | V | | K |
| CAA | | | N | | | | | | | V | H | | Y | | | | V | | K |
| AAA | | | N | | | | G | | | V | H | R | Y | | | | V | D | K |
| CAA | G | | N | | | | G | | | V | H | | Y | | | | V | D | K |
| CAA | | L | N | | | | G | | | V | H | | Y | | | T | V | D | K |
| TAA | G | | N | | | | G | | | V | H | | Y | G | S | | V | D | K |
| TAA | G | | N | | | E | G | | | V | H | | Y | | S | | V | | K |
| TAA | G | | N | | | | G | | | V | H | | Y | | S | | V | D | K |
| TAA | G | | N | | | | G | | R | V | H | | | | | | V | | K |
| TAA | | | N | | | | G | | R | V | H | | Y | | | | V | | K |
| TAA | G | | N | | A | | G | | | V | H | | | | | | V | | K |
| TAA | G | | N | | | | | | | V | H | | | | | | V | | K |

TABLE 2C
SpCas9 Variants and PAM Specificity

| | SpCas9 amino acid position | | | | | | | | | |
|---|---|---|---|---|---|---|---|---|---|---|
| | 1114 | 1131 | 1135 | 1150 | 1156 | 1180 | 1191 | 1218 | 1219 | 1221 |
| PAM | R | Y | D | E | K | D | K | G | E | Q |
| SacB.TAT | | | N | | | | N | | V | H |
| SacB.TAT | | | N | | | | | S | V | H |
| AAT | | | N | | | | | S | V | H |
| TAT | G | | N | | | G | | S | V | H |
| TAT | G | | N | | | G | | S | V | H |
| TAT | G | C | N | | | G | | S | V | H |
| TAT | G | C | N | | | G | | S | V | H |
| TAT | G | C | N | | | G | | S | V | H |
| TAT | G | C | N | | E | G | | S | V | H |
| TAT | G | C | N | V | | G | | S | V | H |
| TAT | | C | N | | | G | | S | V | H |
| TAT | G | C | N | | | G | | S | V | H |

| | SpCas9 amino acid position | | | | | | | | | |
|---|---|---|---|---|---|---|---|---|---|---|
| | 1227 | 1249 | 1253 | 1286 | 1293 | 1320 | 1321 | 1332 | 1335 | 1339 |
| PAM | A | P | E | N | A | A | P | D | R | T |
| SacB.TAT | | | | | | V | S | | L | |
| SacB.TAT | | S | | | | | S | G | L | |
| AAT | V | S | | K | T | | S | G | L | I |
| TAT | | S | K | | | | S | G | L | |
| TAT | | S | | | | | S | G | L | |
| TAT | | S | | | | | S | G | L | |
| TAT | | S | | | | | S | G | L | |
| TAT | | S | | | | | S | G | L | |
| TAT | | S | | | | | S | G | L | |
| TAT | | S | | | | | S | G | L | |
| TAT | | S | | | | | S | G | L | |
| TAT | | S | | | | | S | G | L | |

TABLE 2D
SpCas9 Variants and PAM Specificity acid

| | SpCas9 amino acid position | | | | | | | | | | | | | |
|---|---|---|---|---|---|---|---|---|---|---|---|---|---|---|
| | 1114 | 1127 | 1135 | 1180 | 1207 | 1219 | 1234 | 1286 | 1301 | 1332 | 1335 | 1337 | 1338 | 1349 |
| PAM | R | D | D | D | E | E | N | N | P | D | R | T | S | H |

| | | | | | | | | | | | | | |
|---|---|---|---|---|---|---|---|---|---|---|---|---|---|
| SacB.CAC | | | N | | | V | | | N | Q | N | | |
| AAC | G | | N | | | V | | | N | Q | N | | |
| AAC | G | | N | | | V | | | N | Q | N | | |
| TAC | G | | N | | | V | | | N | Q | N | | |
| TAC | G | | N | | | V | | H | N | Q | N | | |
| TAC | G | | N | | G | V | D | H | N | Q | N | | |
| TAC | G | | N | | | V | | | N | Q | N | | |
| TAC | G | G | N | E | | V | | H | N | Q | N | | |
| TAC | G | | N | | | V | | H | N | Q | N | | |
| TAC | G | | N | | | V | | | N | Q | N | T | R |

[0382] Further exemplary Cas9 (e.g., SaCas9) polypeptides with modified PAM recognition are described in Kleinstiver, et al. “Broadening the targeting range of Staphylococcus aureus CRISPR-Cas9 by modifying PAM recognition,” Nature Biotechnology, 33:1293-1298 (2015) DOI: 10.1038/nbt.3404, the disclosure of which is incorporated herein by reference in its entirety for all purposes. In some embodiments, a Cas9 variant (e.g., a SaCas9 variant) comprising one or more of the alterations E782K, N929R, N968K, and/or R1015H has specificity for, or is associated with increased editing activities relative to a reference polypeptide (e.g., SaCas9) at an NNNRRT or NNHRRT PAM sequence, where N represents any nucleotide, H represents any nucleotide other than G (i.e., “not G”), and R represents a purine. In embodiments, the Cas9 variant (e.g., a SaCas9 variant) comprises the alterations E782K, N968K, and R1015H or the alterations E782K, K929R, and R1015H.

[0383] In some embodiments, the nucleic acid programmable DNA binding protein (napDNAbp) is a single effector of a microbial CRISPR-Cas system. Single effectors of microbial CRISPR-Cas systems include, without limitation, Cas9, Cpf1, Cas12b/C2c1, and Cas12c/C2c3. Typically, microbial CRISPR-Cas systems are divided into Class 1 and Class 2 systems. Class 1 systems have multisubunit effector complexes, while Class 2 systems have a single protein effector. For example, Cas9 and Cpf1 are Class 2 effectors. In addition to Cas9 and Cpf1, three distinct Class 2 CRISPR-Cas systems (Cas12b/C2c1, and Cas12c/C2c3) have been described by Shmakov et al., “Discovery and Functional Characterization of Diverse Class 2 CRISPR Cas Systems”, Mol. Cell, 2015 Nov. 5; 60(3): 385-397, the entire contents of which is hereby incorporated by reference. Effectors of two of the systems, Cas12b/C2c1, and Cas12c/C2c3, contain RuvC-like endonuclease domains related to Cpf1. A third system contains an effector with two predicated HEPN RNase domains. Production of mature CRISPR RNA is tracrRNA-independent, unlike production of CRISPR RNA by Cas12b/C2cl. Cas12b/C2cl depends on both CRISPR RNA and tracrRNA for DNA cleavage.

[0384] In some embodiments, the napDNAbp is a circular permutant (e.g., SEQ ID NO: 238).

[0385] The crystal structure of Alicyclobaccillus acidoterrastris Cas12b/C2cl (AacC2c1) has been reported in complex with a chimeric single-molecule guide RNA (sgRNA). See e.g., Liu et al., “C2c1-sgRNA Complex Structure Reveals RNA-Guided DNA Cleavage Mechanism”, Mol. Cell, 2017 Jan. 19; 65(2):310-322, the entire contents of which are hereby incorporated by reference. The crystal structure has also been reported in Alicyclobacillus acidoterrestris C2cl bound to target DNAs as ternary complexes. See e.g., Yang et al., “PAM-dependent Target DNA Recognition and Cleavage by C2C1 CRISPR-Cas endonuclease”, Cell, 2016 Dec. 15; 167(7):1814-1828, the entire contents of which are hereby incorporated by reference. Catalytically competent conformations of AacC2c1, both with target and non-target DNA strands, have been captured independently positioned within a single RuvC catalytic pocket, with Cas12b/C2c1-mediated cleavage resulting in a staggered seven-nucleotide break of target DNA. Structural comparisons between Cas12b/C2c1 ternary complexes and previously identified Cas9 and Cpf1 counterparts demonstrate the diversity of mechanisms used by CRISPR-Cas9 systems.

[0386] In some embodiments, the nucleic acid programmable DNA binding protein (napDNAbp) of any of the fusion proteins or complexes provided herein may be a Cas12b/C2c1, or a Cas12c/C2c3 protein. In some embodiments, the napDNAbp is a Cas12b/C2cl protein. In some embodiments, the napDNAbp is a Cas12c/C2c3 protein. In some embodiments, the napDNAbp comprises an amino acid sequence that is at least 85%, at least 90%, at least 91%, at least 92%, at least 93%, at least 94%, at least 95%, at least 96%, at least 97%, at least 98%, at least 99%, or at ease 99.5% identical to a naturally-occurring Cas12b/C2c1 or Cas12c/C2c3 protein. In some embodiments, the napDNAbp is a naturally-occurring Cas12b/C2c1 or Cas12c/C2c3 protein. In some embodiments, the napDNAbp comprises an amino acid sequence that is at least 85%, at least 90%, at least 91%, at least 92%, at least 93%, at least 94%, at least 95%, at least 96%, at least 97%, at least 98%, at least 99%, or at ease 99.5% identical to any one of the napDNAbp sequences provided herein. It should be appreciated that Cas12b/C2c1 or Cas12c/C2c3 from other bacterial species may also be used in accordance with the present disclosure.

[0387] In some embodiments, a napDNAbp refers to Cas12c. In some embodiments, the Cas12c protein is a Cas12cl (SEQ ID NO: 239) or a variant of Cas12c1. In some embodiments, the Cas12 protein is a Cas12c2 (SEQ ID NO: 240) or a variant of Cas12c2. In some embodiments, the Cas12 protein is a Cas12c protein from Oleiphilus sp. H10009 (i.e., OspCas12c; SEQ ID NO: 241) or a variant of OspCas12c. These Cas12c molecules have been described in Yan et al., “Functionally Diverse Type V CRISPR-Cas Systems,” Science, 2019 Jan. 4; 363: 88-91; the entire contents of which is hereby incorporated by reference. In some embodiments, the napDNAbp comprises an amino acid sequence that is at least 85%, at least 90%, at least 91%, at least 92%, at least 93%, at least 94%, at least 95%, at least 96%, at least 97%, at least 98%, at least 99%, or at least 99.5% identical to a naturally-occurring Cas12c1, Cas12c2, or OspCas12c protein. In some embodiments, the napDNAbp is a naturally-occurring Cas12c1, Cas12c2, or OspCas12c protein. In some embodiments, the napDNAbp comprises an amino acid sequence that is at least 85%, at least 90%, at least 91%, at least 92%, at least 93%, at least 94%, at least 95%, at least 96%, at least 97%, at least 98%, at least 99%, or at ease 99.5% identical to any Cas12cl, Cas12c2, or OspCas12c protein described herein. It should be appreciated that Cas12c1, Cas12c2, or OspCas12c from other bacterial species may also be used in accordance with the present disclosure.

[0388] In some embodiments, a napDNAbp refers to Cas12g, Cas12h, or Cas12i, which have been described in, for example, Yan et al., “Functionally Diverse Type V CRISPR-Cas Systems,” Science, 2019 Jan. 4; 363: 88-91; the entire contents of each is hereby incorporated by reference. Exemplary Cas12g, Cas12h, and Cas12i polypeptide sequences are provided in the Sequence Listing as SEQ ID NOs: 242-245. By aggregating more than 10 terabytes of sequence data, new classifications of Type V Cas proteins were identified that showed weak similarity to previously characterized Class V protein, including Cas12g, Cas12h, and Cas12i. In some embodiments, the Cas12 protein is a Cas12g or a variant of Cas12g. In some embodiments, the Cas12 protein is a Cas12h or a variant of Cas12h. In some embodiments, the Cas12 protein is a Cas12i or a variant of Cas12i. It should be appreciated that other RNA-guided DNA binding proteins may be used as a napDNAbp, and are within the scope of this disclosure. In some embodiments, the napDNAbp comprises an amino acid sequence that is at least 85%, at least 90%, at least 91%, at least 92%, at least 93%, at least 94%, at least 95%, at least 96%, at least 97%, at least 98%, at least 99%, or at least 99.5% identical to a naturally-occurring Cas12g, Cas12h, or Cas12i protein. In some embodiments, the napDNAbp is a naturally-occurring Cas12g, Cas12h, or Cas12i protein. In some embodiments, the napDNAbp comprises an amino acid sequence that is at least 85%, at least 90%, at least 91%, at least 92%, at least 93%, at least 94%, at least 95%, at least 96%, at least 97%, at least 98%, at least 99%, or at ease 99.5% identical to any Cas12g, Cas12h, or Cas12i protein described herein. It should be appreciated that Cas12g, Cas12h, or Cas12i from other bacterial species may also be used in accordance with the present disclosure. In some embodiments, the Cas12i is a Cas12i1 or a Cas12i2.

[0389] In some embodiments, the nucleic acid programmable DNA binding protein (napDNAbp) of any of the fusion proteins or complexes provided herein may be a Cas12j/CasΦ protein. Cas12j/CasΦ is described in Pausch et al., “CRISPR-CasΦ from huge phages is a hypercompact genome editor,” Science, 17 Jul. 2020, Vol. 369, Issue 6501, pp. 333-337, which is incorporated herein by reference in its entirety. In some embodiments, the napDNAbp comprises an amino acid sequence that is at least 85%, at least 90%, at least 91%, at least 92%, at least 93%, at least 94%, at least 95%, at least 96%, at least 97%, at least 98%, at least 99%, or at ease 99.5% identical to a naturally-occurring Cas12j/CasΦ protein. In some embodiments, the napDNAbp is a naturally-occurring Cas12j/CasΦ protein. In some embodiments, the napDNAbp is a nuclease inactive (“dead”) Cas12j/CasΦ protein. It should be appreciated that Cas12j/CasΦ from other species may also be used in accordance with the present disclosure.

Fusion Proteins or Complexes with Internal Insertions

[0390] Provided herein are fusion proteins or complexes comprising a heterologous polypeptide fused to a nucleic acid programmable nucleic acid binding protein, for example, a napDNAbp. A heterologous polypeptide can be a polypeptide that is not found in the native or wild-type napDNAbp polypeptide sequence. The heterologous polypeptide can be fused to the napDNAbp at a C-terminal end of the napDNAbp, an N-terminal end of the napDNAbp, or inserted at an internal location of the napDNAbp. In some embodiments, the heterologous polypeptide is a deaminase (e.g., cytidine or adenosine deaminase) or a functional fragment thereof. For example, a fusion protein can comprise a deaminase flanked by an N-terminal fragment and a C-terminal fragment of a Cas9 or a Cas12 (e.g., Cas12b/C2cl), polypeptide. In some embodiments, the cytidine deaminase is an APOBEC deaminase (e.g., APOBEC1). In some embodiments, the adenosine deaminase is a TadA (e.g., TadA*7.10 or TadA*8). In some embodiments, the TadA is a TadA*8 or a TadA*9. TadA sequences (e.g., TadA7.10 or TadA*8) as described herein are suitable deaminases for the above-described fusion proteins or complexes.

[0391] In some embodiments, the fusion protein comprises the structure:
[0392] NH2-[N-terminal fragment of a napDNAbp]-[deaminase]-[C-terminal fragment of a napDNAbp]-COOH;
[0393] NH2-[N-terminal fragment of a Cas9]-[adenosine deaminase]-[C-terminal fragment of a Cas9]-COOH;
[0394] NH2-[N-terminal fragment of a Cas12]-[adenosine deaminase]-[C-terminal fragment of a Cas12]-COOH;
[0395] NH2-[N-terminal fragment of a Cas9]-[cytidine deaminase]-[C-terminal fragment of a Cas9]-COOH;
[0396] NH2-[N-terminal fragment of a Cas12]-[cytidine deaminase]-[C-terminal fragment of a Cas12]-COOH;
[0397] wherein each instance of “]-[” indicates the optional presence of a linker (i.e., the linker is optionally present).

[0398] The deaminase can be a circular permutant deaminase. For example, the deaminase can be a circular permutant adenosine deaminase. In some embodiments, the deaminase is a circular permutant TadA, circularly permutated at amino acid residue 116, 136, or 65 as numbered in the TadA reference sequence.

[0399] The fusion protein or complexes can comprise more than one deaminase. The fusion protein or complex can comprise, for example, 1, 2, 3, 4, 5 or more deaminases. In some embodiments, the fusion protein or complex comprises one or two deaminase. The two or more deaminases in a fusion protein or complex can be an adenosine deaminase, a cytidine deaminase, or a combination thereof. The two or more deaminases can be homodimers or heterodimers. The two or more deaminases can be inserted in tandem in the napDNAbp. In some embodiments, the two or more deaminases may not be in tandem in the napDNAbp.

[0400] In some embodiments, the napDNAbp in the fusion protein or complex is a Cas9 polypeptide or a fragment thereof. The Cas9 polypeptide can be a variant Cas9 polypeptide. In some embodiments, the Cas9 polypeptide is a Cas9 nickase (nCas9) polypeptide or a fragment thereof. In some embodiments, the Cas9 polypeptide is a nuclease dead Cas9 (dCas9) polypeptide or a fragment thereof. The Cas9 polypeptide in a fusion protein or complex can be a full-length Cas9 polypeptide. In some cases, the Cas9 polypeptide in a fusion protein or complex may not be a full length Cas9 polypeptide. The Cas9 polypeptide can be truncated, for example, at a N-terminal or C-terminal end relative to a naturally-occurring Cas9 protein. The Cas9 polypeptide can be a circularly permuted Cas9 protein. The Cas9 polypeptide can be a fragment, a portion, or a domain of a Cas9 polypeptide, that is still capable of binding the target polynucleotide and a guide nucleic acid sequence.

[0401] In some embodiments, the Cas9 polypeptide is a Streptococcus pyogenes Cas9 (SpCas9), Staphylococcus aureus Cas9 (SaCas9), Streptococcus thermophilus 1 Cas9 (St1Cas9), or fragments or variants of any of the Cas9 polypeptides described herein.

[0402] In some embodiments, the fusion protein comprises an adenosine deaminase domain and a cytidine deaminase domain inserted within a Cas9. In some embodiments, an adenosine deaminase is fused within a Cas9 and a cytidine deaminase is fused to the C-terminus. In some embodiments, an adenosine deaminase is fused within Cas9 and a cytidine deaminase fused to the N-terminus. In some embodiments, a cytidine deaminase is fused within Cas9 and an adenosine deaminase is fused to the C-terminus. In some embodiments, a cytidine deaminase is fused within Cas9 and an adenosine deaminase fused to the N-terminus.

[0403] Exemplary structures of a fusion protein with an adenosine deaminase and a cytidine deaminase and a Cas9 are provided as follows:
[0404] NH2-[Cas9(adenosine deaminase)]-[cytidine deaminase]-COOH;
[0405] NH2-[cytidine deaminase]-[Cas9(adenosine deaminase)]-COOH;
[0406] NH2-[Cas9(cytidine deaminase)]-[adenosine deaminase]-COOH; or
[0407] NH2-[adenosine deaminase]-[Cas9(cytidine deaminase)]-COOH.

[0408] In some embodiments, the “-” used in the general architecture above indicates the optional presence of a linker (i.e., the linker is optionally present).

[0409] In various embodiments, the catalytic domain has DNA modifying activity (e.g., deaminase activity), such as adenosine deaminase activity. In some embodiments, the adenosine deaminase is a TadA (e.g., TadA*7.10). In some embodiments, the TadA is a TadA*8. In some embodiments, a TadA*8 is fused within Cas9 and a cytidine deaminase is fused to the C-terminus. In some embodiments, a TadA*8 is fused within Cas9 and a cytidine deaminase fused to the N-terminus. In some embodiments, a cytidine deaminase is fused within Cas9 and a TadA*8 is fused to the C-terminus. In some embodiments, a cytidine deaminase is fused within Cas9 and a TadA*8 fused to the N-terminus. Exemplary structures of a fusion protein with a TadA*8 and a cytidine deaminase and a Cas9 are provided as follows:
[0410] NH2-[Cas9(TadA*8)]-[cytidine deaminase]-COOH;
[0411] NH2-[cytidine deaminase]-[Cas9(TadA*8)]—COOH;
[0412] NH2-[Cas9(cytidine deaminase)]-[TadA*8]—COOH; or
[0413] NH2-[TadA*8]-[Cas9(cytidine deaminase)]-COOH.

[0414] In some embodiments, the “-” used in the general architecture above indicates the optional presence of a linker (i.e., the linker is optionally present).

[0415] The heterologous polypeptide (e.g., deaminase) can be inserted in the napDNAbp (e.g., Cas9 or Cas12 (e.g., Cas12b/C2cl)) at a suitable location, for example, such that the napDNAbp retains its ability to bind the target polynucleotide and a guide nucleic acid. A deaminase (e.g., adenosine deaminase, cytidine deaminase, or adenosine deaminase and cytidine deaminase (dual deaminase)) can be inserted into a napDNAbp without compromising function of the deaminase (e.g., base editing activity) or the napDNAbp (e.g., ability to bind to target nucleic acid and guide nucleic acid). A deaminase (e.g., adenosine deaminase, cytidine deaminase, or adenosine deaminase and cytidine deaminase) can be inserted in the napDNAbp at, for example, a disordered region or a region comprising a high temperature factor or B-factor as shown by crystallographic studies. Regions of a protein that are less ordered, disordered, or unstructured, for example solvent exposed regions and loops, can be used for insertion without compromising structure or function. A deaminase (e.g., adenosine deaminase, cytidine deaminase, or adenosine deaminase and cytidine deaminase) can be inserted in the napDNAbp in a flexible loop region or a solvent-exposed region. In some embodiments, the deaminase (e.g., adenosine deaminase, cytidine deaminase, or adenosine deaminase and cytidine deaminase) is inserted in a flexible loop of the Cas9 or the Cas12b/C2cl polypeptide.

[0416] In some embodiments, the insertion location of a deaminase (e.g., adenosine deaminase, cytidine deaminase, or adenosine deaminase and cytidine deaminase) is determined by B-factor analysis of the crystal structure of Cas9 polypeptide. In some embodiments, the deaminase (e.g., adenosine deaminase, cytidine deaminase, or adenosine deaminase and cytidine deaminase) is inserted in regions of the Cas9 polypeptide comprising higher than average B-factors (e.g., higher B factors compared to the total protein or the protein domain comprising the disordered region). B-factor or temperature factor can indicate the fluctuation of atoms from their average position (for example, as a result of temperature-dependent atomic vibrations or static disorder in a crystal lattice). A high B-factor (e.g., higher than average B-factor) for backbone atoms can be indicative of a region with relatively high local mobility. Such a region can be used for inserting a deaminase without compromising structure or function. A deaminase (e.g., adenosine deaminase, cytidine deaminase, or adenosine deaminase and cytidine deaminase) can be inserted at a location with a residue having a Cu atom with a B-factor that is 50%, 60%, 70%, 80%, 90%, 100%, 110%, 120%, 130%, 140%, 150%, 160%, 170%, 180%, 190%, 200%, or greater than 200% more than the average B-factor for the total protein. A deaminase (e.g., adenosine deaminase, cytidine deaminase, or adenosine deaminase and cytidine deaminase) can be inserted at a location with a residue having a Cu atom with a B-factor that is 50%, 60%, 70%, 80%, 90%, 100%, 110%, 120%, 130%, 140%, 150%, 160%, 170%, 180%, 190%, 200% or greater than 200% more than the average B-factor for a Cas9 protein domain comprising the residue. Cas9 polypeptide positions comprising a higher than average B-factor can include, for example, residues 768, 792, 1052, 1015, 1022, 1026, 1029, 1067, 1040, 1054, 1068, 1246, 1247, and 1248 as numbered in the above Cas9 reference sequence. Cas9 polypeptide regions comprising a higher than average B-factor can include, for example, residues 792-872, 792-906, and 2-791 as numbered in the above Cas9 reference sequence.

[0417] A heterologous polypeptide (e.g., deaminase) can be inserted in the napDNAbp at an amino acid residue selected from the group consisting of: 768, 791, 792, 1015, 1016, 1022, 1023, 1026, 1029, 1040, 1052, 1054, 1067, 1068, 1069, 1246, 1247, and 1248 as numbered in the above Cas9 reference sequence, or a corresponding amino acid residue in another Cas9 polypeptide. In some embodiments, the heterologous polypeptide is inserted between amino acid positions 768-769, 791-792, 792-793, 1015-1016, 1022-1023, 1026-1027, 1029-1030, 1040-1041, 1052-1053, 1054-1055, 1067-1068, 1068-1069, 1247-1248, or 1248-1249 as numbered in the above Cas9 reference sequence or corresponding amino acid positions thereof. In some embodiments, the heterologous polypeptide is inserted between amino acid positions 769-770, 792-793, 793-794, 1016-1017, 1023-1024, 1027-1028, 1030-1031, 1041-1042, 1053-1054, 1055-1056, 1068-1069, 1069-1070, 1248-1249, or 1249-1250 as numbered in the above Cas9 reference sequence or corresponding amino acid positions thereof. In some embodiments, the heterologous polypeptide replaces an amino acid residue selected from the group consisting of: 768, 791, 792, 1015, 1016, 1022, 1023, 1026, 1029, 1040, 1052, 1054, 1067, 1068, 1069, 1246, 1247, and 1248 as numbered in the above Cas9 reference sequence, or a corresponding amino acid residue in another Cas9 polypeptide. It should be understood that the reference to the above Cas9 reference sequence with respect to insertion positions is for illustrative purposes. The insertions as discussed herein are not limited to the Cas9 polypeptide sequence of the above Cas9 reference sequence, but include insertion at corresponding locations in variant Cas9 polypeptides, for example a Cas9 nickase (nCas9), nuclease dead Cas9 (dCas9), a Cas9 variant lacking a nuclease domain, a truncated Cas9, or a Cas9 domain lacking partial or complete HNH domain.

[0418] A heterologous polypeptide (e.g., deaminase) can be inserted in the napDNAbp at an amino acid residue selected from the group consisting of: 768, 792, 1022, 1026, 1040, 1068, and 1247 as numbered in the above Cas9 reference sequence, or a corresponding amino acid residue in another Cas9 polypeptide. In some embodiments, the heterologous polypeptide is inserted between amino acid positions 768-769, 792-793, 1022-1023, 1026-1027, 1029-1030, 1040-1041, 1068-1069, or 1247-1248 as numbered in the above Cas9 reference sequence or corresponding amino acid positions thereof. In some embodiments, the heterologous polypeptide is inserted between amino acid positions 769-770, 793-794, 1023-1024, 1027-1028, 1030-1031, 1041-1042, 1069-1070, or 1248-1249 as numbered in the above Cas9 reference sequence or corresponding amino acid positions thereof. In some embodiments, the heterologous polypeptide replaces an amino acid residue selected from the group consisting of: 768, 792, 1022, 1026, 1040, 1068, and 1247 as numbered in the above Cas9 reference sequence, or a corresponding amino acid residue in another Cas9 polypeptide.

[0419] A heterologous polypeptide (e.g., deaminase) can be inserted in the napDNAbp at an amino acid residue as described herein, or a corresponding amino acid residue in another Cas9 polypeptide. In an embodiment, a heterologous polypeptide (e.g., deaminase) can be inserted in the napDNAbp at an amino acid residue selected from the group consisting of: 1002, 1003, 1025, 1052-1056, 1242-1247, 1061-1077, 943-947, 686-691, 569-578, 530-539, and 1060-1077 as numbered in the above Cas9 reference sequence, or a corresponding amino acid residue in another Cas9 polypeptide. The deaminase (e.g., adenosine deaminase, cytidine deaminase, or adenosine deaminase and cytidine deaminase) can be inserted at the N-terminus or the C-terminus of the residue or replace the residue. In some embodiments, the deaminase (e.g., adenosine deaminase, cytidine deaminase, or adenosine deaminase and cytidine deaminase) is inserted at the C-terminus of the residue.

[0420] In some embodiments, an adenosine deaminase (e.g., TadA) is inserted at an amino acid residue selected from the group consisting of: 1015, 1022, 1029, 1040, 1068, 1247, 1054, 1026, 768, 1067, 1248, 1052, and 1246 as numbered in the above Cas9 reference sequence, or a corresponding amino acid residue in another Cas9 polypeptide. In some embodiments, an adenosine deaminase (e.g., TadA) is inserted in place of residues 792-872, 792-906, or 2-791 as numbered in the above Cas9 reference sequence, or a corresponding amino acid residue in another Cas9 polypeptide. In some embodiments, the adenosine deaminase is inserted at the N-terminus of an amino acid selected from the group consisting of: 1015, 1022, 1029, 1040, 1068, 1247, 1054, 1026, 768, 1067, 1248, 1052, and 1246 as numbered in the above Cas9 reference sequence, or a corresponding amino acid residue in another Cas9 polypeptide. In some embodiments, the adenosine deaminase is inserted at the C-terminus of an amino acid selected from the group consisting of: 1015, 1022, 1029, 1040, 1068, 1247, 1054, 1026, 768, 1067, 1248, 1052, and 1246 as numbered in the above Cas9 reference sequence, or a corresponding amino acid residue in another Cas9 polypeptide. In some embodiments, the adenosine deaminase is inserted to replace an amino acid selected from the group consisting of: 1015, 1022, 1029, 1040, 1068, 1247, 1054, 1026, 768, 1067, 1248, 1052, and 1246 as numbered in the above Cas9 reference sequence, or a corresponding amino acid residue in another Cas9 polypeptide.

[0421] In some embodiments, a cytidine deaminase (e.g., APOBEC1) is inserted at an amino acid residue selected from the group consisting of: 1016, 1023, 1029, 1040, 1069, and 1247 as numbered in the above Cas9 reference sequence, or a corresponding amino acid residue in another Cas9 polypeptide. In some embodiments, the cytidine deaminase is inserted at the N-terminus of an amino acid selected from the group consisting of: 1016, 1023, 1029, 1040, 1069, and 1247 as numbered in the above Cas9 reference sequence, or a corresponding amino acid residue in another Cas9 polypeptide. In some embodiments, the cytidine deaminase is inserted at the C-terminus of an amino acid selected from the group consisting of: 1016, 1023, 1029, 1040, 1069, and 1247 as numbered in the above Cas9 reference sequence, or a corresponding amino acid residue in another Cas9 polypeptide. In some embodiments, the cytidine deaminase is inserted to replace an amino acid selected from the group consisting of: 1016, 1023, 1029, 1040, 1069, and 1247 as numbered in the above Cas9 reference sequence, or a corresponding amino acid residue in another Cas9 polypeptide.

[0422] In some embodiments, the deaminase (e.g., adenosine deaminase, cytidine deaminase, or adenosine deaminase and cytidine deaminase) is inserted at amino acid residue 768 as numbered in the above Cas9 reference sequence, or a corresponding amino acid residue in another Cas9 polypeptide. In some embodiments, the deaminase (e.g., adenosine deaminase, cytidine deaminase, or adenosine deaminase and cytidine deaminase) is inserted at the N-terminus of amino acid residue 768 as numbered in the above Cas9 reference sequence, or a corresponding amino acid residue in another Cas9 polypeptide. In some embodiments, the deaminase (e.g., adenosine deaminase, cytidine deaminase, or adenosine deaminase and cytidine deaminase) is inserted at the C-terminus of amino acid residue 768 as numbered in the above Cas9 reference sequence, or a corresponding amino acid residue in another Cas9 polypeptide. In some embodiments, the deaminase (e.g., adenosine deaminase, cytidine deaminase, or adenosine deaminase and cytidine deaminase) is inserted to replace amino acid residue 768 as numbered in the above Cas9 reference sequence, or a corresponding amino acid residue in another Cas9 polypeptide.

[0423] In some embodiments, the deaminase (e.g., adenosine deaminase, cytidine deaminase, or adenosine deaminase and cytidine deaminase) is inserted at amino acid residue 791 or is inserted at amino acid residue 792, as numbered in the above Cas9 reference sequence, or a corresponding amino acid residue in another Cas9 polypeptide. In some embodiments, the deaminase (e.g., adenosine deaminase, cytidine deaminase, or adenosine deaminase and cytidine deaminase) is inserted at the N-terminus of amino acid residue 791 or is inserted at the N-terminus of amino acid 792, as numbered in the above Cas9 reference sequence, or a corresponding amino acid residue in another Cas9 polypeptide. In some embodiments, the deaminase (e.g., adenosine deaminase, cytidine deaminase, or adenosine deaminase and cytidine deaminase) is inserted at the C-terminus of amino acid 791 or is inserted at the N-terminus of amino acid 792, as numbered in the above Cas9 reference sequence, or a corresponding amino acid residue in another Cas9 polypeptide. In some embodiments, the deaminase (e.g., adenosine deaminase, cytidine deaminase, or adenosine deaminase and cytidine deaminase) is inserted to replace amino acid 791, or is inserted to replace amino acid 792, as numbered in the above Cas9 reference sequence, or a corresponding amino acid residue in another Cas9 polypeptide.

[0424] In some embodiments, the deaminase (e.g., adenosine deaminase, cytidine deaminase, or adenosine deaminase and cytidine deaminase) is inserted at amino acid residue 1016 as numbered in the above Cas9 reference sequence, or a corresponding amino acid residue in another Cas9 polypeptide. In some embodiments, the deaminase (e.g., adenosine deaminase, cytidine deaminase, or adenosine deaminase and cytidine deaminase) is inserted at the N-terminus of amino acid residue 1016 as numbered in the above Cas9 reference sequence, or a corresponding amino acid residue in another Cas9 polypeptide. In some embodiments, the deaminase (e.g., adenosine deaminase, cytidine deaminase, or adenosine deaminase and cytidine deaminase) is inserted at the C-terminus of amino acid residue 1016 as numbered in the above Cas9 reference sequence, or a corresponding amino acid residue in another Cas9 polypeptide. In some embodiments, the deaminase (e.g., adenosine deaminase, cytidine deaminase, or adenosine deaminase and cytidine deaminase) is inserted to replace amino acid residue 1016 as numbered in the above Cas9 reference sequence, or a corresponding amino acid residue in another Cas9 polypeptide.

[0425] In some embodiments, the deaminase (e.g., adenosine deaminase, cytidine deaminase, or adenosine deaminase and cytidine deaminase) is inserted at amino acid residue 1022, or is inserted at amino acid residue 1023, as numbered in the above Cas9 reference sequence, or a corresponding amino acid residue in another Cas9 polypeptide. In some embodiments, the deaminase (e.g., adenosine deaminase, cytidine deaminase, or adenosine deaminase and cytidine deaminase) is inserted at the N-terminus of amino acid residue 1022 or is inserted at the N-terminus of amino acid residue 1023, as numbered in the above Cas9 reference sequence, or a corresponding amino acid residue in another Cas9 polypeptide. In some embodiments, the deaminase (e.g., adenosine deaminase, cytidine deaminase, or adenosine deaminase and cytidine deaminase) is inserted at the C-terminus of amino acid residue 1022 or is inserted at the C-terminus of amino acid residue 1023, as numbered in the above Cas9 reference sequence, or a corresponding amino acid residue in another Cas9 polypeptide. In some embodiments, the deaminase (e.g., adenosine deaminase, cytidine deaminase, or adenosine deaminase and cytidine deaminase) is inserted to replace amino acid residue 1022, or is inserted to replace amino acid residue 1023, as numbered in the above Cas9 reference sequence, or a corresponding amino acid residue in another Cas9 polypeptide.

[0426] In some embodiments, the deaminase (e.g., adenosine deaminase, cytidine deaminase, or adenosine deaminase and cytidine deaminase) is inserted at amino acid residue 1026, or is inserted at amino acid residue 1029, as numbered in the above Cas9 reference sequence, or a corresponding amino acid residue in another Cas9 polypeptide. In some embodiments, the deaminase (e.g., adenosine deaminase, cytidine deaminase, or adenosine deaminase and cytidine deaminase) is inserted at the N-terminus of amino acid residue 1026 or is inserted at the N-terminus of amino acid residue 1029, as numbered in the above Cas9 reference sequence, or a corresponding amino acid residue in another Cas9 polypeptide. In some embodiments, the deaminase (e.g., adenosine deaminase, cytidine deaminase, or adenosine deaminase and cytidine deaminase) is inserted at the C-terminus of amino acid residue 1026 or is inserted at the C-terminus of amino acid residue 1029, as numbered in the above Cas9 reference sequence, or a corresponding amino acid residue in another Cas9 polypeptide. In some embodiments, the deaminase (e.g., adenosine deaminase, cytidine deaminase, or adenosine deaminase and cytidine deaminase) is inserted to replace amino acid residue 1026, or is inserted to replace amino acid residue 1029, as numbered in the above Cas9 reference sequence, or corresponding amino acid residue in another Cas9 polypeptide.

[0427] In some embodiments, the deaminase (e.g., adenosine deaminase, cytidine deaminase, or adenosine deaminase and cytidine deaminase) is inserted at amino acid residue 1040 as numbered in the above Cas9 reference sequence, or a corresponding amino acid residue in another Cas9 polypeptide. In some embodiments, the deaminase (e.g., adenosine deaminase, cytidine deaminase, or adenosine deaminase and cytidine deaminase) is inserted at the N-terminus of amino acid residue 1040 as numbered in the above Cas9 reference sequence, or a corresponding amino acid residue in another Cas9 polypeptide. In some embodiments, the deaminase (e.g., adenosine deaminase, cytidine deaminase, or adenosine deaminase and cytidine deaminase) is inserted at the C-terminus of amino acid residue 1040 as numbered in the above Cas9 reference sequence, or a corresponding amino acid residue in another Cas9 polypeptide. In some embodiments, the deaminase (e.g., adenosine deaminase, cytidine deaminase, or adenosine deaminase and cytidine deaminase) is inserted to replace amino acid residue 1040 as numbered in the above Cas9 reference sequence, or a corresponding amino acid residue in another Cas9 polypeptide.

[0428] In some embodiments, the deaminase (e.g., adenosine deaminase, cytidine deaminase, or adenosine deaminase and cytidine deaminase) is inserted at amino acid residue 1052, or is inserted at amino acid residue 1054, as numbered in the above Cas9 reference sequence, or a corresponding amino acid residue in another Cas9 polypeptide. In some embodiments, the deaminase (e.g., adenosine deaminase, cytidine deaminase, or adenosine deaminase and cytidine deaminase) is inserted at the N-terminus of amino acid residue 1052 or is inserted at the N-terminus of amino acid residue 1054, as numbered in the above Cas9 reference sequence, or a corresponding amino acid residue in another Cas9 polypeptide. In some embodiments, the deaminase (e.g., adenosine deaminase, cytidine deaminase, or adenosine deaminase and cytidine deaminase) is inserted at the C-terminus of amino acid residue 1052 or is inserted at the C-terminus of amino acid residue 1054, as numbered in the above Cas9 reference sequence, or a corresponding amino acid residue in another Cas9 polypeptide. In some embodiments, the deaminase (e.g., adenosine deaminase, cytidine deaminase, or adenosine deaminase and cytidine deaminase) is inserted to replace amino acid residue 1052, or is inserted to replace amino acid residue 1054, as numbered in the above Cas9 reference sequence, or a corresponding amino acid residue in another Cas9 polypeptide.

[0429] In some embodiments, the deaminase (e.g., adenosine deaminase, cytidine deaminase, or adenosine deaminase and cytidine deaminase) is inserted at amino acid residue 1067, or is inserted at amino acid residue 1068, or is inserted at amino acid residue 1069, as numbered in the above Cas9 reference sequence, or a corresponding amino acid residue in another Cas9 polypeptide. In some embodiments, the deaminase (e.g., adenosine deaminase, cytidine deaminase, or adenosine deaminase and cytidine deaminase) is inserted at the N-terminus of amino acid residue 1067 or is inserted at the N-terminus of amino acid residue 1068 or is inserted at the N-terminus of amino acid residue 1069, as numbered in the above Cas9 reference sequence, or a corresponding amino acid residue in another Cas9 polypeptide. In some embodiments, the deaminase (e.g., adenosine deaminase, cytidine deaminase, or adenosine deaminase and cytidine deaminase) is inserted at the C-terminus of amino acid residue 1067 or is inserted at the C-terminus of amino acid residue 1068 or is inserted at the C-terminus of amino acid residue 1069, as numbered in the above Cas9 reference sequence, or a corresponding amino acid residue in another Cas9 polypeptide. In some embodiments, the deaminase (e.g., adenosine deaminase, cytidine deaminase, or adenosine deaminase and cytidine deaminase) is inserted to replace amino acid residue 1067, or is inserted to replace amino acid residue 1068, or is inserted to replace amino acid residue 1069, as numbered in the above Cas9 reference sequence, or a corresponding amino acid residue in another Cas9 polypeptide.

[0430] In some embodiments, the deaminase (e.g., adenosine deaminase, cytidine deaminase, or adenosine deaminase and cytidine deaminase) is inserted at amino acid residue 1246, or is inserted at amino acid residue 1247, or is inserted at amino acid residue 1248, as numbered in the above Cas9 reference sequence, or a corresponding amino acid residue in another Cas9 polypeptide. In some embodiments, the deaminase (e.g., adenosine deaminase, cytidine deaminase, or adenosine deaminase and cytidine deaminase) is inserted at the N-terminus of amino acid residue 1246 or is inserted at the N-terminus of amino acid residue 1247 or is inserted at the N-terminus of amino acid residue 1248, as numbered in the above Cas9 reference sequence, or a corresponding amino acid residue in another Cas9 polypeptide. In some embodiments, the deaminase (e.g., adenosine deaminase, cytidine deaminase, or adenosine deaminase and cytidine deaminase) is inserted at the C-terminus of amino acid residue 1246 or is inserted at the C-terminus of amino acid residue 1247 or is inserted at the C-terminus of amino acid residue 1248, as numbered in the above Cas9 reference sequence, or a corresponding amino acid residue in another Cas9 polypeptide. In some embodiments, the deaminase (e.g., adenosine deaminase, cytidine deaminase, or adenosine deaminase and cytidine deaminase) is inserted to replace amino acid residue 1246, or is inserted to replace amino acid residue 1247, or is inserted to replace amino acid residue 1248, as numbered in the above Cas9 reference sequence, or a corresponding amino acid residue in another Cas9 polypeptide.

[0431] In some embodiments, a heterologous polypeptide (e.g., deaminase) is inserted in a flexible loop of a Cas9 polypeptide. The flexible loop portions can be selected from the group consisting of 530-537, 569-570, 686-691, 943-947, 1002-1025, 1052-1077, 1232-1247, or 1298-1300 as numbered in the above Cas9 reference sequence, or a corresponding amino acid residue in another Cas9 polypeptide. The flexible loop portions can be selected from the group consisting of: 1-529, 538-568, 580-685, 692-942, 948-1001, 1026-1051, 1078-1231, or 1248-1297 as numbered in the above Cas9 reference sequence, or a corresponding amino acid residue in another Cas9 polypeptide.

[0432] A heterologous polypeptide (e.g., adenine deaminase) can be inserted into a Cas9 polypeptide region corresponding to amino acid residues: 1017-1069, 1242-1247, 1052-1056, 1060-1077, 1002-1003, 943-947, 530-537, 568-579, 686-691, 1242-1247, 1298-1300, 1066-1077, 1052-1056, or 1060-1077 as numbered in the above Cas9 reference sequence, or a corresponding amino acid residue in another Cas9 polypeptide.

[0433] A heterologous polypeptide (e.g., adenine deaminase) can be inserted in place of a deleted region of a Cas9 polypeptide. The deleted region can correspond to an N-terminal or C-terminal portion of the Cas9 polypeptide. In some embodiments, the deleted region corresponds to residues 792-872 as numbered in the above Cas9 reference sequence, or a corresponding amino acid residue in another Cas9 polypeptide. In some embodiments, the deleted region corresponds to residues 792-906 as numbered in the above Cas9 reference sequence, or a corresponding amino acid residue in another Cas9 polypeptide. In some embodiments, the deleted region corresponds to residues 2-791 as numbered in the above Cas9 reference sequence, or a corresponding amino acid residue in another Cas9 polypeptide. In some embodiments, the deleted region corresponds to residues 1017-1069 as numbered in the above Cas9 reference sequence, or corresponding amino acid residues thereof.

[0434] Exemplary internal fusions base editors are provided in Table 3 below:

TABLE 3
Insertion loci in Cas9 proteins

| BE ID | Modification | Other ID |
|---|---|---|
| IBE001 | Cas9 TadA ins 1015 | ISLAY01 |
| IBE002 | Cas9 TadA ins 1022 | ISLAY02 |
| IBE003 | Cas9 TadA ins 1029 | ISLAY03 |
| IBE004 | Cas9 TadA ins 1040 | ISLAY04 |
| IBE005 | Cas9 TadA ins 1068 | ISLAY05 |
| IBE006 | Cas9 TadA ins 1247 | ISLAY06 |
| IBE007 | Cas9 TadA ins 1054 | ISLAY07 |
| IBE008 | Cas9 TadA ins 1026 | ISLAY08 |
| IBE009 | Cas9 TadA ins 768 | ISLAY09 |
| IBE020 | delta HNH TadA 792 | ISLAY20 |
| IBE021 | N-term fusion single TadA helix truncated 165-end | ISLAY21 |
| IBE029 | TadA-Circular Permutant116 ins1067 | ISLAY29 |
| IBE031 | TadA-Circular Permutant 136 ins1248 | ISLAY31 |
| IBE032 | TadA-Circular Permutant 136ins 1052 | ISLAY32 |
| IBE035 | delta 792-872 TadA ins | ISLAY35 |
| IBE036 | delta 792-906 TadA ins | ISLAY36 |
| IBE043 | TadA-Circular Permutant 65 ins1246 | ISLAY43 |
| IBE044 | TadA ins C-term truncate2 791 | ISLAY44 |

[0435] A heterologous polypeptide (e.g., deaminase) can be inserted within a structural or functional domain of a Cas9 polypeptide. A heterologous polypeptide (e.g., deaminase) can be inserted between two structural or functional domains of a Cas9 polypeptide. A heterologous polypeptide (e.g., deaminase) can be inserted in place of a structural or functional domain of a Cas9 polypeptide, for example, after deleting the domain from the Cas9 polypeptide. The structural or functional domains of a Cas9 polypeptide can include, for example, RuvC I, RuvC II, RuvC III, Rec1, Rec2, PI, or HNH.

[0436] In some embodiments, the Cas9 polypeptide lacks one or more domains selected from the group consisting of: RuvC I, RuvC II, RuvC III, Rec1, Rec2, PI, or HNH domain. In some embodiments, the Cas9 polypeptide lacks a nuclease domain. In some embodiments, the Cas9 polypeptide lacks an HNH domain. In some embodiments, the Cas9 polypeptide lacks a portion of the HNH domain such that the Cas9 polypeptide has reduced or abolished HNH activity. In some embodiments, the Cas9 polypeptide comprises a deletion of the nuclease domain, and the deaminase is inserted to replace the nuclease domain. In some embodiments, the HNH domain is deleted and the deaminase is inserted in its place. In some embodiments, one or more of the RuvC domains is deleted and the deaminase is inserted in its place.

[0437] A fusion protein comprising a heterologous polypeptide can be flanked by a N-terminal and a C-terminal fragment of a napDNAbp. In some embodiments, the fusion protein comprises a deaminase flanked by a N-terminal fragment and a C-terminal fragment of a Cas9 polypeptide. The N terminal fragment or the C terminal fragment can bind the target polynucleotide sequence. The C-terminus of the N terminal fragment or the N-terminus of the C terminal fragment can comprise a part of a flexible loop of a Cas9 polypeptide. The C-terminus of the N terminal fragment or the N-terminus of the C terminal fragment can comprise a part of an alpha-helix structure of the Cas9 polypeptide. The N-terminal fragment or the C-terminal fragment can comprise a DNA binding domain. The N-terminal fragment or the C-terminal fragment can comprise a RuvC domain. The N-terminal fragment or the C-terminal fragment can comprise an HNH domain. In some embodiments, neither of the N-terminal fragment and the C-terminal fragment comprises an HNH domain.

[0438] In some embodiments, the C-terminus of the N terminal Cas9 fragment comprises an amino acid that is in proximity to a target nucleobase when the fusion protein deaminates the target nucleobase. In some embodiments, the N-terminus of the C terminal Cas9 fragment comprises an amino acid that is in proximity to a target nucleobase when the fusion protein deaminates the target nucleobase. The insertion location of different deaminases can be different in order to have proximity between the target nucleobase and an amino acid in the C-terminus of the N terminal Cas9 fragment or the N-terminus of the C terminal Cas9 fragment. For example, the insertion position of an deaminase can be at an amino acid residue selected from the group consisting of 1015, 1022, 1029, 1040, 1068, 1247, 1054, 1026, 768, 1067, 1248, 1052, and 1246 as numbered in the above Cas9 reference sequence, or a corresponding amino acid residue in another Cas9 polypeptide.

[0439] The N-terminal Cas9 fragment of a fusion protein (i.e. the N-terminal Cas9 fragment flanking the deaminase in a fusion protein) can comprise the N-terminus of a Cas9 polypeptide. The N-terminal Cas9 fragment of a fusion protein can comprise a length of at least about: 100, 200, 300, 400, 500, 600, 700, 800, 900, 1000, 1100, 1200, or 1300 amino acids. The N-terminal Cas9 fragment of a fusion protein can comprise a sequence corresponding to amino acid residues: 1-56, 1-95, 1-200, 1-300, 1-400, 1-500, 1-600, 1-700, 1-718, 1-765, 1-780, 1-906, 1-918, or 1-1100 as numbered in the above Cas9 reference sequence, or a corresponding amino acid residue in another Cas9 polypeptide. The N-terminal Cas9 fragment can comprise a sequence comprising at least: 85%, at least 90%, at least 91%, at least 92%, at least 93%, at least 94%, at least 95%, at least 96%, at least 97%, at least 98%, at least 99%, or at least 99.5% sequence identity to amino acid residues: 1-56, 1-95, 1-200, 1-300, 1-400, 1-500, 1-600, 1-700, 1-718, 1-765, 1-780, 1-906, 1-918, or 1-1100 as numbered in the above Cas9 reference sequence, or a corresponding amino acid residue in another Cas9 polypeptide.

[0440] The C-terminal Cas9 fragment of a fusion protein (i.e. the C-terminal Cas9 fragment flanking the deaminase in a fusion protein) can comprise the C-terminus of a Cas9 polypeptide. The C-terminal Cas9 fragment of a fusion protein can comprise a length of at least about: 100, 200, 300, 400, 500, 600, 700, 800, 900, 1000, 1100, 1200, or 1300 amino acids. The C-terminal Cas9 fragment of a fusion protein can comprise a sequence corresponding to amino acid residues: 1099-1368, 918-1368, 906-1368, 780-1368, 765-1368, 718-1368, 94-1368, or 56-1368 as numbered in the above Cas9 reference sequence, or a corresponding amino acid residue in another Cas9 polypeptide. The N-terminal Cas9 fragment can comprise a sequence comprising at least: 85%, at least 90%, at least 91%, at least 92%, at least 93%, at least 94%, at least 95%, at least 96%, at least 97%, at least 98%, at least 99%, or at least 99.5% sequence identity to amino acid residues: 1099-1368, 918-1368, 906-1368, 780-1368, 765-1368, 718-1368, 94-1368, or 56-1368 as numbered in the above Cas9 reference sequence, or a corresponding amino acid residue in another Cas9 polypeptide.

[0441] The N-terminal Cas9 fragment and C-terminal Cas9 fragment of a fusion protein taken together may not correspond to a full-length naturally occurring Cas9 polypeptide sequence, for example, as set forth in the above Cas9 reference sequence.

[0442] The fusion protein or complex described herein can effect targeted deamination with reduced deamination at non-target sites (e.g., off-target sites), such as reduced genome wide spurious deamination. The fusion protein or complex described herein can effect targeted deamination with reduced bystander deamination at non-target sites. The undesired deamination or off-target deamination can be reduced by at least 30%, at least 40%, at least 50%, at least 60%, at least 70%, at least 80%, at least 90%, at least 95%, or at least 99% compared with, for example, an end terminus fusion protein comprising the deaminase fused to a N terminus or a C terminus of a Cas9 polypeptide. The undesired deamination or off-target deamination can be reduced by at least one-fold, at least two-fold, at least three-fold, at least four-fold, at least five-fold, at least tenfold, at least fifteen fold, at least twenty fold, at least thirty fold, at least forty fold, at least fifty fold, at least 60 fold, at least 70 fold, at least 80 fold, at least 90 fold, or at least hundred fold, compared with, for example, an end terminus fusion protein comprising the deaminase fused to a N terminus or a C terminus of a Cas9 polypeptide.

[0443] In some embodiments, the deaminase (e.g., adenosine deaminase, cytidine deaminase, or adenosine deaminase and cytidine deaminase) of the fusion protein or complex deaminates no more than two nucleobases within the range of an R-loop. In some embodiments, the deaminase of the fusion protein or complex deaminates no more than three nucleobases within the range of the R-loop. In some embodiments, the deaminase of the fusion protein or complex deaminates no more than 2, 3, 4, 5, 6, 7, 8, 9, or 10 nucleobases within the range of the R-loop. An R-loop is a three-stranded nucleic acid structure including a DNA:RNA hybrid, a DNA:DNA or an RNA: RNA complementary structure and the associated with single-stranded DNA. As used herein, an R-loop may be formed when a target polynucleotide is contacted with a CRISPR complex or a base editing complex, wherein a portion of a guide polynucleotide, e.g. a guide RNA, hybridizes with and displaces with a portion of a target polynucleotide, e.g. a target DNA. In some embodiments, an R-loop comprises a hybridized region of a spacer sequence and a target DNA complementary sequence. An R-loop region may be of about 5, 6, 7, 8, 9, 10, 11, 12, 13, 14, 15, 16, 17, 18, 19, 20, 21, 22, 23, 24, 25, 26, 27, 28, 29, 30, 31, 32, 33, 34, 35, 36, 37, 38, 39, 40, 41, 42, 43, 44, 45, 46, 47, 48, 49, or 50 nucleobase pairs in length. In some embodiments, the R-loop region is about 20 nucleobase pairs in length. It should be understood that, as used herein, an R-loop region is not limited to the target DNA strand that hybridizes with the guide polynucleotide. For example, editing of a target nucleobase within an R-loop region may be to a DNA strand that comprises the complementary strand to a guide RNA, or may be to a DNA strand that is the opposing strand of the strand complementary to the guide RNA. In some embodiments, editing in the region of the R-loop comprises editing a nucleobase on non-complementary strand (protospacer strand) to a guide RNA in a target DNA sequence.

[0444] The fusion protein or complex described herein can effect target deamination in an editing window different from canonical base editing. In some embodiments, a target nucleobase is from about 1 to about 20 bases upstream of a PAM sequence in the target polynucleotide sequence. In some embodiments, a target nucleobase is from about 2 to about 12 bases upstream of a PAM sequence in the target polynucleotide sequence. In some embodiments, a target nucleobase is from about 1 to 9 base pairs, about 2 to 10 base pairs, about 3 to 11 base pairs, about 4 to 12 base pairs, about 5 to 13 base pairs, about 6 to 14 base pairs, about 7 to 15 base pairs, about 8 to 16 base pairs, about 9 to 17 base pairs, about 10 to 18 base pairs, about 11 to 19 base pairs, about 12 to 20 base pairs, about 1 to 7 base pairs, about 2 to 8 base pairs, about 3 to 9 base pairs, about 4 to 10 base pairs, about 5 to 11 base pairs, about 6 to 12 base pairs, about 7 to 13 base pairs, about 8 to 14 base pairs, about 9 to 15 base pairs, about 10 to 16 base pairs, about 11 to 17 base pairs, about 12 to 18 base pairs, about 13 to 19 base pairs, about 14 to 20 base pairs, about 1 to 5 base pairs, about 2 to 6 base pairs, about 3 to 7 base pairs, about 4 to 8 base pairs, about 5 to 9 base pairs, about 6 to 10 base pairs, about 7 to 11 base pairs, about 8 to 12 base pairs, about 9 to 13 base pairs, about 10 to 14 base pairs, about 11 to 15 base pairs, about 12 to 16 base pairs, about 13 to 17 base pairs, about 14 to 18 base pairs, about 15 to 19 base pairs, about 16 to 20 base pairs, about 1 to 3 base pairs, about 2 to 4 base pairs, about 3 to 5 base pairs, about 4 to 6 base pairs, about 5 to 7 base pairs, about 6 to 8 base pairs, about 7 to 9 base pairs, about 8 to 10 base pairs, about 9 to 11 base pairs, about 10 to 12 base pairs, about 11 to 13 base pairs, about 12 to 14 base pairs, about 13 to 15 base pairs, about 14 to 16 base pairs, about 15 to 17 base pairs, about 16 to 18 base pairs, about 17 to 19 base pairs, about 18 to 20 base pairs away or upstream of the PAM sequence. In some embodiments, a target nucleobase is about 1, 2, 3, 4, 5, 6, 7, 8, 9, 10, 11, 12, 13, 14, 15, 16, 17, 18, 19, 20, or more base pairs away from or upstream of the PAM sequence. In some embodiments, a target nucleobase is about 1, 2, 3, 4, 5, 6, 7, 8, or 9 base pairs upstream of the PAM sequence. In some embodiments, a target nucleobase is about 2, 3, 4, or 6 base pairs upstream of the PAM sequence.

[0445] The fusion protein or complex can comprise more than one heterologous polypeptide. For example, the fusion protein or complex can additionally comprise one or more UGI domains and/or one or more nuclear localization signals. The two or more heterologous domains can be inserted in tandem. The two or more heterologous domains can be inserted at locations such that they are not in tandem in the NapDNAbp.

[0446] A fusion protein can comprise a linker between the deaminase and the napDNAbp polypeptide. The linker can be a peptide or a non-peptide linker. For example, the linker can be an XTEN, (GGGS)n (SEQ ID NO: 246), (GGGGS)n (SEQ ID NO: 247), (G)n, (EAAAK)n (SEQ ID NO: 248), (GGS)n, SGSETPGTSESATPES (SEQ ID NO: 249). In some embodiments, the fusion protein comprises a linker between the N-terminal Cas9 fragment and the deaminase. In some embodiments, the fusion protein comprises a linker between the C-terminal Cas9 fragment and the deaminase. In some embodiments, the N-terminal and C-terminal fragments of napDNAbp are connected to the deaminase with a linker. In some embodiments, the N-terminal and C-terminal fragments are joined to the deaminase domain without a linker. In some embodiments, the fusion protein comprises a linker between the N-terminal Cas9 fragment and the deaminase, but does not comprise a linker between the C-terminal Cas9 fragment and the deaminase. In some embodiments, the fusion protein comprises a linker between the C-terminal Cas9 fragment and the deaminase, but does not comprise a linker between the N-terminal Cas9 fragment and the deaminase.

[0447] In some embodiments, the napDNAbp in the fusion protein or complex is a Cas12 polypeptide, e.g., Cas12b/C2c1, or a functional fragment thereof capable of associating with a nucleic acid (e.g., a gRNA) that guides the Cas12 to a specific nucleic acid sequence. The Cas12 polypeptide can be a variant Cas12 polypeptide. In other embodiments, the N- or C-terminal fragments of the Cas12 polypeptide comprise a nucleic acid programmable DNA binding domain or a RuvC domain. In other embodiments, the fusion protein contains a linker between the Cas12 polypeptide and the catalytic domain. In other embodiments, the amino acid sequence of the linker is GGSGGS (SEQ ID NO: 250) or GSSGSETPGTSESATPESSG (SEQ ID NO: 251). In other embodiments, the linker is a rigid linker. In other embodiments of the above aspects, the linker is encoded by GGAGGCTCTGGAGGAAGC (SEQ ID NO: 252) or GGCTCTTCTGGATCTGAAACACCTGGCACAAGCGAGAGCGCCACCCCTGAGAGCTCTGGC (SEQ ID NO: 253).

[0448] Fusion proteins comprising a heterologous catalytic domain flanked by N- and C-terminal fragments of a Cas12 polypeptide are also useful for base editing in the methods as described herein. Fusion proteins comprising Cas12 and one or more deaminase domains, e.g., adenosine deaminase, or comprising an adenosine deaminase domain flanked by Cas12 sequences are also useful for highly specific and efficient base editing of target sequences. In an embodiment, a chimeric Cas12 fusion protein contains a heterologous catalytic domain (e.g., adenosine deaminase, cytidine deaminase, or adenosine deaminase and cytidine deaminase) inserted within a Cas12 polypeptide. In some embodiments, the fusion protein comprises an adenosine deaminase domain and a cytidine deaminase domain inserted within a Cas12. In some embodiments, an adenosine deaminase is fused within Cas12 and a cytidine deaminase is fused to the C-terminus. In some embodiments, an adenosine deaminase is fused within Cas12 and a cytidine deaminase fused to the N-terminus. In some embodiments, a cytidine deaminase is fused within Cas12 and an adenosine deaminase is fused to the C-terminus. In some embodiments, a cytidine deaminase is fused within Cas12 and an adenosine deaminase fused to the N-terminus. Exemplary structures of a fusion protein with an adenosine deaminase and a cytidine deaminase and a Cas12 are provided as follows:
[0449] NH2-[Cas12(adenosine deaminase)]-[cytidine deaminase]-COOH;
[0450] NH2-[cytidine deaminase]-[Cas12(adenosine deaminase)]-COOH;
[0451] NH2-[Cas12(cytidine deaminase)]-[adenosine deaminase]-COOH; or
[0452] NH2-[adenosine deaminase]-[Cas12(cytidine deaminase)]-COOH;

[0453] In some embodiments, the “-” used in the general architecture above indicates the optional presence of a linker.

[0454] In various embodiments, the catalytic domain has DNA modifying activity (e.g., deaminase activity), such as adenosine deaminase activity. In some embodiments, the adenosine deaminase is a TadA (e.g., TadA*7.10). In some embodiments, the TadA is a TadA*8. In some embodiments, a TadA*8 is fused within Cas12 and a cytidine deaminase is fused to the C-terminus. In some embodiments, a TadA*8 is fused within Cas12 and a cytidine deaminase fused to the N-terminus. In some embodiments, a cytidine deaminase is fused within Cas12 and a TadA*8 is fused to the C-terminus. In some embodiments, a cytidine deaminase is fused within Cas12 and a TadA*8 fused to the N-terminus. Exemplary structures of a fusion protein with a TadA*8 and a cytidine deaminase and a Cas12 are provided as follows:
[0455] N-[Cas12(TadA*8)]-[cytidine deaminase]-C;
[0456] N-[cytidine deaminase]-[Cas12(TadA*8)]-C;
[0457] N-[Cas12(cytidine deaminase)]-[TadA*8]-C; or
[0458] N-[TadA*8]-[Cas12(cytidine deaminase)]-C.

[0459] In some embodiments, the “-” used in the general architecture above indicates the optional presence of a linker.

[0460] In other embodiments, the fusion protein contains one or more catalytic domains. In other embodiments, at least one of the one or more catalytic domains is inserted within the Cas12 polypeptide or is fused at the Cas12 N-terminus or C-terminus. In other embodiments, at least one of the one or more catalytic domains is inserted within a loop, an alpha helix region, an unstructured portion, or a solvent accessible portion of the Cas12 polypeptide. In other embodiments, the Cas12 polypeptide is Cas12a, Cas12b, Cas12c, Cas12d, Cas12e, Cas12g, Cas12h, Cas12i, or Cas12j/CasΦ. In other embodiments, the Cas12 polypeptide has at least about 85% amino acid sequence identity to Bacillus hisashii Cas12b, Bacillus thermoamylovorans Cas12b, Bacillus sp. V3-13 Cas12b, or Alicyclobacillus acidiphilus Cas12b (SEQ ID NO: 254). In other embodiments, the Cas12 polypeptide has at least about 90% amino acid sequence identity to Bacillus hisashii Cas12b (SEQ ID NO: 255), Bacillus thermoamylovorans Cas12b, Bacillus sp. V3-13 Cas12b, or Alicyclobacillus acidiphilus Cas12b. In other embodiments, the Cas12 polypeptide has at least about 95% amino acid sequence identity to Bacillus hisashii Cas12b, Bacillus thermoamylovorans Cas12b (SEQ ID NO: 256), Bacillus sp. V3-13 Cas12b (SEQ ID NO: 257), or Alicyclobacillus acidiphilus Cas12b. In other embodiments, the Cas12 polypeptide contains or consists essentially of a fragment of Bacillus hisashii Cas12b, Bacillus thermoamylovorans Cas12b, Bacillus sp. V3-13 Cas12b, or Alicyclobacillus acidiphilus Cas12b. In embodiments, the Cas12 polypeptide contains BvCas12b (V4), which in some embodiments is expressed as 5′ mRNA Cap---5′ UTR---bhCas12b---STOP sequence---3′ UTR---120polyA tail (SEQ ID NOs: 258-260).

[0461] In other embodiments, the catalytic domain is inserted between amino acid positions 153-154, 255-256, 306-307, 980-981, 1019-1020, 534-535, 604-605, or 344-345 of BhCas12b or a corresponding amino acid residue of Cas12a, Cas12c, Cas12d, Cas12e, Cas12g, Cas12h, Cas12i, or Cas12j/CasΦ. In other embodiments, the catalytic domain is inserted between amino acids P153 and S154 of BhCas12b. In other embodiments, the catalytic domain is inserted between amino acids K255 and E256 of BhCas12b. In other embodiments, the catalytic domain is inserted between amino acids D980 and G981 of BhCas12b. In other embodiments, the catalytic domain is inserted between amino acids K1019 and L1020 of BhCas12b. In other embodiments, the catalytic domain is inserted between amino acids F534 and P535 of BhCas12b. In other embodiments, the catalytic domain is inserted between amino acids K604 and G605 of BhCas12b. In other embodiments, the catalytic domain is inserted between amino acids H344 and F345 of BhCas12b. In other embodiments, catalytic domain is inserted between amino acid positions 147 and 148, 248 and 249, 299 and 300, 991 and 992, or 1031 and 1032 of BvCas12b or a corresponding amino acid residue of Cas12a, Cas12c, Cas12d, Cas12e, Cas12g, Cas12h, Cas12i, or Cas12j/Cas4. In other embodiments, the catalytic domain is inserted between amino acids P147 and D148 of BvCas12b. In other embodiments, the catalytic domain is inserted between amino acids G248 and G249 of BvCas12b. In other embodiments, the catalytic domain is inserted between amino acids P299 and E300 of BvCas12b. In other embodiments, the catalytic domain is inserted between amino acids G991 and E992 of BvCas12b. In other embodiments, the catalytic domain is inserted between amino acids K1031 and M1032 of BvCas12b. In other embodiments, the catalytic domain is inserted between amino acid positions 157 and 158, 258 and 259, 310 and 311, 1008 and 1009, or 1044 and 1045 of AaCas12b or a corresponding amino acid residue of Cas12a, Cas12c, Cas12d, Cas12e, Cas12g, Cas12h, Cas12i, or Cas12j/Cas4. In other embodiments, the catalytic domain is inserted between amino acids P157 and G158 of AaCas12b. In other embodiments, the catalytic domain is inserted between amino acids V258 and G259 of AaCas12b. In other embodiments, the catalytic domain is inserted between amino acids D310 and P311 of AaCas12b. In other embodiments, the catalytic domain is inserted between amino acids G1008 and E1009 of AaCas12b. In other embodiments, the catalytic domain is inserted between amino acids G1044 and K1045 at of AaCas12b.

[0462] In other embodiments, the fusion protein or complex contains a nuclear localization signal (e.g., a bipartite nuclear localization signal). In other embodiments, the amino acid sequence of the nuclear localization signal is MAPKKKRKVGIHGVPAA (SEQ ID NO: 261). In other embodiments of the above aspects, the nuclear localization signal is encoded by the following sequence:
[0463] ATGGCCCCAAAGAAGAAGCGGAAGGTCGGTATCCACGGAGTCCCAGCAGCC (SEQ ID NO: 262). In other embodiments, the Cas12b polypeptide contains a mutation that silences the catalytic activity of a RuvC domain. In other embodiments, the Cas12b polypeptide contains D574A, D829A and/or D952A mutations. In other embodiments, the fusion protein or complex further contains a tag (e.g., an influenza hemagglutinin tag).

[0464] In some embodiments, the fusion protein or complex comprises a napDNAbp domain (e.g., Cas12-derived domain) with an internally fused nucleobase editing domain (e.g., all or a portion (e.g., a functional portion) of a deaminase domain, e.g., an adenosine deaminase domain). In some embodiments, the napDNAbp is a Cas12b. In some embodiments, the base editor comprises a BhCas12b domain with an internally fused TadA*8 domain inserted at the loci provided in Table 4 below.

TABLE 4
Insertion loci in Cas12b proteins

| BhCas 12b | Insertion site | Inserted between aa |
|---|---|---|
| position 1 | 153 | PS |
| position 2 | 255 | KE |
| position 3 | 306 | DE |
| position 4 | 980 | DG |
| position 5 | 1019 | KL |
| position 6 | 534 | FP |
| position 7 | 604 | KG |
| position 8 | 344 | HF |
| BvCas12b | Insertion site | Inserted between aa |
| position 1 | 147 | PD |
| position 2 | 248 | GG |
| position 3 | 299 | PE |
| position 4 | 991 | GE |
| position 5 | 1031 | KM |
| AaCas12b | Insertion site | Inserted between aa |
| position 1 | 157 | PG |
| position 2 | 258 | VG |
| position 3 | 310 | DP |
| position 4 | 1008 | GE |
| position 5 | 1044 | GK |

[0465] By way of nonlimiting example, an adenosine deaminase (e.g., TadA*8.13) may be inserted into a BhCas12b to produce a fusion protein (e.g., TadA*8.13-BhCas12b) that effectively edits a nucleic acid sequence.

[0466] In some embodiments, the base editing system described herein is an ABE with TadA inserted into a Cas9. Polypeptide sequences of relevant ABEs with TadA inserted into a Cas9 are provided in the attached Sequence Listing as SEQ ID NOs: 263-308.

[0467] In some embodiments, adenosine base editors were generated to insert TadA or variants thereof into the Cas9 polypeptide at the identified positions.

[0468] Exemplary, yet nonlimiting, fusion proteins are described in International PCT Application Nos. PCT/US2020/016285 and U.S. Provisional Application Nos. 62/852,228 and 62/852,224, the contents of which are incorporated by reference herein in their entireties.

### A to G Editing

[0469] In some embodiments, a base editor described herein comprises an adenosine deaminase domain. Such an adenosine deaminase domain of a base editor can facilitate the editing of an adenine (A) nucleobase to a guanine (G) nucleobase by deaminating the A to form inosine (I), which exhibits base pairing properties of G. Adenosine deaminase is capable of deaminating (i.e., removing an amine group) adenine of a deoxyadenosine residue in deoxyribonucleic acid (DNA). In some embodiments, an A-to-G base editor further comprises an inhibitor of inosine base excision repair, for example, a uracil glycosylase inhibitor (UGI) domain or a catalytically inactive inosine specific nuclease. Without wishing to be bound by any particular theory, the UGI domain or catalytically inactive inosine specific nuclease can inhibit or prevent base excision repair of a deaminated adenosine residue (e.g., inosine), which can improve the activity or efficiency of the base editor.

[0470] A base editor comprising an adenosine deaminase can act on any polynucleotide, including DNA, RNA and DNA-RNA hybrids. In certain embodiments, a base editor comprising an adenosine deaminase can deaminate a target A of a polynucleotide comprising RNA. For example, the base editor can comprise an adenosine deaminase domain capable of deaminating a target A of an RNA polynucleotide and/or a DNA-RNA hybrid polynucleotide. In an embodiment, an adenosine deaminase incorporated into a base editor comprises all or a portion (e.g., a functional portion) of adenosine deaminase acting on RNA (ADAR, e.g., ADAR1 or ADAR2) or tRNA (ADAT). A base editor comprising an adenosine deaminase domain can also be capable of deaminating an A nucleobase of a DNA polynucleotide. In an embodiment an adenosine deaminase domain of a base editor comprises all or a portion (e.g., a functional portion) of an ADAT comprising one or more mutations which permit the ADAT to deaminate a target A in DNA. For example, the base editor can comprise all or a portion (e.g., a functional portion) of an ADAT from Escherichia coli (EcTadA) comprising one or more of the following mutations: D108N, A106V, D147Y, E155V, L84F, H123Y, I156F, or a corresponding mutation in another adenosine deaminase. Exemplary ADAT homolog polypeptide sequences are provided in the Sequence Listing as SEQ ID NOs: 1 and 309-315.

[0471] The adenosine deaminase can be derived from any suitable organism (e.g., E. coli). In some embodiments, the adenosine deaminase is from a prokaryote. In some embodiments, the adenosine deaminase is from a bacterium. In some embodiments, the adenosine deaminase is from Escherichia coli, Staphylococcus aureus, Salmonella typhi, Shewanella putrefaciens, Haemophilus influenzae, Caulobacter crescentus, or Bacillus subtilis. In some embodiments, the adenosine deaminase is from E. coli. In some embodiments, the adenine deaminase is a naturally-occurring adenosine deaminase that includes one or more mutations corresponding to any of the mutations provided herein (e.g., mutations in ecTadA). The corresponding residue in any homologous protein can be identified by e.g., sequence alignment and determination of homologous residues. The mutations in any naturally-occurring adenosine deaminase (e.g., having homology to ecTadA) that correspond to any of the mutations described herein (e.g., any of the mutations identified in ecTadA) can be generated accordingly.

[0472] In some embodiments, the adenosine deaminase comprises an amino acid sequence that is at least 60%, at least 65%, at least 70%, at least 75%, at least 80%, at least 85%, at least 90%, at least 95%, at least 96%, at least 97%, at least 98%, at least 99%, or at least 99.5% identical to any one of the amino acid sequences set forth in any of the adenosine deaminases provided herein. It should be appreciated that adenosine deaminases provided herein may include one or more mutations (e.g., any of the mutations provided herein). The disclosure provides any deaminase domains with a certain percent identify plus any of the mutations or combinations thereof described herein. In some embodiments, the adenosine deaminase comprises an amino acid sequence that has 1, 2, 3, 4, 5, 6, 7, 8, 9, 10, 11, 12, 13, 14, 15, 16, 17, 18, 19, 20, 21, 22, 21, 24, 25, 26, 27, 28, 29, 30, 31, 32, 33, 34, 35, 36, 37, 38, 39, 40, 41, 42, 43, 44, 45, 46, 47, 48, 49, 50, or more mutations compared to a reference sequence, or any of the adenosine deaminases provided herein. In some embodiments, the adenosine deaminase comprises an amino acid sequence that has at least 5, at least 10, at least 15, at least 20, at least 25, at least 30, at least 35, at least 40, at least 45, at least 50, at least 60, at least 70, at least 80, at least 90, at least 100, at least 110, at least 120, at least 130, at least 140, at least 150, at least 160, or at least 170 identical contiguous amino acid residues as compared to any one of the amino acid sequences known in the art or described herein.

[0473] It should be appreciated that any of the mutations provided herein (e.g., based on a TadA reference sequence, such as TadA*7.10 (SEQ ID NO: 1)) can be introduced into other adenosine deaminases, such as E. coli TadA (ecTadA), S. aureus TadA (saTadA), or other adenosine deaminases (e.g., bacterial adenosine deaminases). In some embodiments, the TadA reference sequence is TadA*7.10 (SEQ ID NO: 1). It would be apparent to the skilled artisan that additional deaminases may similarly be aligned to identify homologous amino acid residues that can be mutated as provided herein. Thus, any of the mutations identified in a TadA reference sequence can be made in other adenosine deaminases (e.g., ecTada) that have homologous amino acid residues. It should also be appreciated that any of the mutations provided herein can be made individually or in any combination in a TadA reference sequence or another adenosine deaminase.

[0474] In some embodiments, the adenosine deaminase comprises a D108X mutation in a TadA reference sequence, or a corresponding mutation in another adenosine deaminase, where X indicates any amino acid other than the corresponding amino acid in the wild-type adenosine deaminase. In some embodiments, the adenosine deaminase comprises a D108G, D108N, D108V, D108A, or D108Y mutation in a TadA reference sequence, or a corresponding mutation in another adenosine deaminase. It should be appreciated, however, that additional deaminases may similarly be aligned to identify homologous amino acid residues that can be mutated as provided herein.

[0475] In some embodiments, the adenosine deaminase comprises an A106X mutation in a TadA reference sequence, or a corresponding mutation in another adenosine deaminase, where X indicates any amino acid other than the corresponding amino acid in the wild-type adenosine deaminase. In some embodiments, the adenosine deaminase comprises an A106V mutation in a TadA reference sequence, or a corresponding mutation in another adenosine deaminase (e.g. ecTadA).

[0476] In some embodiments, the adenosine deaminase comprises a E155X mutation in a TadA reference sequence, or a corresponding mutation in another adenosine deaminase, where the presence of X indicates any amino acid other than the corresponding amino acid in the wild-type adenosine deaminase. In some embodiments, the adenosine deaminase comprises a E155D, E155G, or E155V mutation in a TadA reference sequence, or a corresponding mutation in another adenosine deaminase (e.g., ecTadA).

[0477] In some embodiments, the adenosine deaminase comprises a D147X mutation in a TadA reference sequence, or a corresponding mutation in another adenosine deaminase, where the presence of X indicates any amino acid other than the corresponding amino acid in the wild-type adenosine deaminase. In some embodiments, the adenosine deaminase comprises a D147Y, mutation in a TadA reference sequence, or a corresponding mutation in another adenosine deaminase (e.g., ecTadA).

[0478] In some embodiments, the adenosine deaminase comprises an A106X, E155X, or D147X, mutation in a TadA reference sequence, or a corresponding mutation in another adenosine deaminase (e.g., ecTadA), where X indicates any amino acid other than the corresponding amino acid in the wild-type adenosine deaminase. In some embodiments, the adenosine deaminase comprises an E155D, E155G, or E155V mutation. In some embodiments, the adenosine deaminase comprises a D147Y.

[0479] It should also be appreciated that any of the mutations provided herein may be made individually or in any combination in ecTadA or another adenosine deaminase. For example, an adenosine deaminase may contain a D108N, a A106V, a E155V, and/or a D147Y mutation in TadA reference sequence, or a corresponding mutation in another adenosine deaminase (e.g., ecTadA). In some embodiments, an adenosine deaminase comprises the following group of mutations (groups of mutations are separated by a “;”) in a TadA reference sequence (e.g., TadA*7.10 (SEQ ID NO:1), or corresponding mutations in another adenosine deaminase: D108N and A106V; D108N and E155V; D108N and D147Y; A106V and E155V; A106V and D147Y; E155V and D147Y; D108N, A106V, and E155V; D108N, A106V, and D147Y; D108N, E155V, and D147Y; A106V, E155V, and D147Y; and D108N, A106V, E155V, and D147Y. It should be appreciated, however, that any combination of corresponding mutations provided herein may be made in an adenosine deaminase (e.g., ecTadA).

[0480] In some embodiments, the adenosine deaminase comprises a combination of mutations in a TadA reference sequence (e.g., TadA*7.10 (SEQ ID NO: 1)), or corresponding mutations in another adenosine deaminase: V82G+Y147T+Q154S; I76Y+V82G+Y147T+Q154S; L36H+V82G+Y147T+Q154S+N157K; V82G+Y147D+F149Y+Q154S+D167N; L36H+V82G+Y147D+F149Y+Q154S+N157K+D167N; L36H+I76Y+V82G+Y147T+Q154S+N157K; I76Y+V82G+Y147D+F149Y+Q154S+D167N; or L36H+I76Y+V82G+Y147D+F149Y+Q154S+N157K+D167N.

[0481] In some embodiments, the adenosine deaminase comprises one or more of a H8X, T17X, L18X, W23X, L34X, W45X, R51X, A56X, E59X, E85X, M94X, I95X, V102X, F104X, A106X, R107X, D108X, K110X, M118X, N127X, A138X, F149X, M151X, R153X, Q154X, I156X, and/or K157X mutation in a TadA reference sequence, or one or more corresponding mutations in another adenosine deaminase, where the presence of X indicates any amino acid other than the corresponding amino acid in the wild-type adenosine deaminase. In some embodiments, the adenosine deaminase comprises one or more of H8Y, T17S, L18E, W23L, L34S, W45L, R51H, A56E, or A56S, E59G, E85K, or E85G, M94L, I95L, V102A, F104L, A106V, R107C, or R107H, or R107P, D108G, or D108N, or D108V, or D108A, or D108Y, K110I, M118K, N127S, A138V, F149Y, M151V, R153C, Q154L, 1156D, and/or K157R mutation in a TadA reference sequence, or one or more corresponding mutations in another adenosine deaminase.

[0482] In some embodiments, the adenosine deaminase comprises one or more of a H8X, D108X, and/or N127X mutation in a TadA reference sequence, or one or more corresponding mutations in another adenosine deaminase, where X indicates the presence of any amino acid. In some embodiments, the adenosine deaminase comprises one or more of a H8Y, D108N, and/or N127S mutation in a TadA reference sequence, or one or more corresponding mutations in another adenosine deaminase.

[0483] In some embodiments, the adenosine deaminase comprises one or more of H8X, R26X, M61X, L68X, M70X, A106X, D108X, A109X, N127X, D147X, R152X, Q154X, E155X, K161X, Q163X, and/or T166X mutation in a TadA reference sequence, or one or more corresponding mutations in another adenosine deaminase, where X indicates the presence of any amino acid other than the corresponding amino acid in the wild-type adenosine deaminase. In some embodiments, the adenosine deaminase comprises one or more of H8Y, R26W, M61I, L68Q, M70V, A106T, D108N, A109T, N127S, D147Y, R152C, Q154H or Q154R, E155G or E155V or E155D, K161Q, Q163H, and/or T166P mutation in a TadA reference sequence, or one or more corresponding mutations in another adenosine deaminase.

[0484] In some embodiments, the adenosine deaminase comprises one, two, three, four, five, or six mutations selected from the group consisting of H8X, D108X, N127X, D147X, R152X, and Q154X in a TadA reference sequence, or a corresponding mutation or mutations in another adenosine deaminase (e.g., ecTadA), where X indicates the presence of any amino acid other than the corresponding amino acid in the wild-type adenosine deaminase. In some embodiments, the adenosine deaminase comprises one, two, three, four, five, six, seven, or eight mutations selected from the group consisting of H8X, M61X, M70X, D108X, N127X, Q154X, E155X, and Q163X in a TadA reference sequence, or a corresponding mutation or mutations in another adenosine deaminase (e.g., ecTadA), where X indicates the presence of any amino acid other than the corresponding amino acid in the wild-type adenosine deaminase. In some embodiments, the adenosine deaminase comprises one, two, three, four, or five, mutations selected from the group consisting of H8X, D108X, N127X, E155X, and T166X in a TadA reference sequence, or a corresponding mutation or mutations in another adenosine deaminase (e.g., ecTadA), where X indicates the presence of any amino acid other than the corresponding amino acid in the wild-type adenosine deaminase.

[0485] In some embodiments, the adenosine deaminase comprises one, two, three, four, five, or six mutations selected from the group consisting of H8X, AT06X, and D108X, or a corresponding mutation or mutations in another adenosine deaminase, where X indicates the presence of any amino acid other than the corresponding amino acid in the wild-type adenosine deaminase. In some embodiments, the adenosine deaminase comprises one, two, three, four, five, six, seven, or eight mutations selected from the group consisting of H8X, R26X, L68X, D108X, N127X, D147X, and E155X, or a corresponding mutation or mutations in another adenosine deaminase, where X indicates the presence of any amino acid other than the corresponding amino acid in the wild-type adenosine deaminase.

[0486] In some embodiments, the adenosine deaminase comprises one, two, three, four, five, six, or seven mutations selected from the group consisting of H8X, R126X, L68X, D108X, N127X, D147X, and E155X in a TadA reference sequence, or a corresponding mutation or mutations in another adenosine deaminase, where X indicates the presence of any amino acid other than the corresponding amino acid in the wild-type adenosine deaminase. In some embodiments, the adenosine deaminase comprises one, two, three, four, or five mutations selected from the group consisting of H8X, D108X, A109X, N127X, and E155X in a TadA reference sequence, or a corresponding mutation or mutations in another adenosine deaminase, where X indicates the presence of any amino acid other than the corresponding amino acid in the wild-type adenosine deaminase.

[0487] In some embodiments, the adenosine deaminase comprises one, two, three, four, five, or six mutations selected from the group consisting of H8Y, D108N, N127S, D147Y, R152C, and Q154H in a TadA reference sequence, or a corresponding mutation or mutations in another adenosine deaminase (e.g., ecTadA). In some embodiments, the adenosine deaminase comprises one, two, three, four, five, six, seven, or eight mutations selected from the group consisting of H8Y, M61I, M70V, D108N, N127S, Q154R, E155G and Q163H in a TadA reference sequence, or a corresponding mutation or mutations in another adenosine deaminase (e.g., ecTadA). In some embodiments, the adenosine deaminase comprises one, two, three, four, or five, mutations selected from the group consisting of H8Y, D108N, N127S, E155V, and T166P in a TadA reference sequence, or a corresponding mutation or mutations in another adenosine deaminase (e.g., ecTadA). In some embodiments, the adenosine deaminase comprises one, two, three, four, five, or six mutations selected from the group consisting of H8Y, A106T, D108N, N127S, E155D, and K161Q in a TadA reference sequence, or a corresponding mutation or mutations in another adenosine deaminase (e.g., ecTadA). In some embodiments, the adenosine deaminase comprises one, two, three, four, five, six, seven, or eight mutations selected from the group consisting of H8Y, R26W, L68Q, D108N, N127S, D147Y, and E155V in a TadA reference sequence, or a corresponding mutation or mutations in another adenosine deaminase (e.g., ecTadA). In some embodiments, the adenosine deaminase comprises one, two, three, four, or five, mutations selected from the group consisting of H8Y, D108N, A109T, N127S, and E155G in a TadA reference sequence, or a corresponding mutation or mutations in another adenosine deaminase (e.g., ecTadA).

[0488] In some embodiments, the adenosine deaminase comprises one or more of the or one or more corresponding mutations in another adenosine deaminase. In some embodiments, the adenosine deaminase comprises a D108N, D108G, or D108V mutation in a TadA reference sequence, or corresponding mutations in another adenosine deaminase. In some embodiments, the adenosine deaminase comprises a A106V and D108N mutation in a TadA reference sequence, or corresponding mutations in another adenosine deaminase. In some embodiments, the adenosine deaminase comprises R107C and D108N mutations in a TadA reference sequence, or corresponding mutations in another adenosine deaminase. In some embodiments, the adenosine deaminase comprises a H8Y, D108N, N127S, D147Y, and Q154H mutation in a TadA reference sequence, or corresponding mutations in another adenosine deaminase. In some embodiments, the adenosine deaminase comprises a H8Y, D108N, N127S, D147Y, and E155V mutation in a TadA reference sequence, or corresponding mutations in another adenosine deaminase. In some embodiments, the adenosine deaminase comprises a D108N, D147Y, and E155V mutation in a TadA reference sequence, or corresponding mutations in another adenosine deaminase. In some embodiments, the adenosine deaminase comprises a H8Y, D108N, and N127S mutation in a TadA reference sequence, or corresponding mutations in another adenosine deaminase. In some embodiments, the adenosine deaminase comprises a A106V, D108N, D147Y, and E155V mutation in a TadA reference sequence, or corresponding mutations in another adenosine deaminase (e.g., ecTadA).

[0489] In some embodiments, the adenosine deaminase comprises one or more of S2X, H8X, I49X, L84X, H123X, N127X, I156X, and/or K160X mutation in a TadA reference sequence, or one or more corresponding mutations in another adenosine deaminase, where the presence of X indicates any amino acid other than the corresponding amino acid in the wild-type adenosine deaminase. In some embodiments, the adenosine deaminase comprises one or more of S2A, H8Y, I49F, L84F, H123Y, N127S, I156F, and/or K160S mutation in a TadA reference sequence, or one or more corresponding mutations in another adenosine deaminase (e.g., ecTadA).

[0490] In some embodiments, the adenosine deaminase comprises an L84X mutation adenosine deaminase, where X indicates any amino acid other than the corresponding amino acid in the wild-type adenosine deaminase. In some embodiments, the adenosine deaminase comprises an L84F mutation in a TadA reference sequence, or a corresponding mutation in another adenosine deaminase (e.g., ecTadA).

[0491] In some embodiments, the adenosine deaminase comprises an H123X mutation in a TadA reference sequence, or a corresponding mutation in another adenosine deaminase, where X indicates any amino acid other than the corresponding amino acid in the wild-type adenosine deaminase. In some embodiments, the adenosine deaminase comprises an H123Y mutation in a TadA reference sequence, or a corresponding mutation in another adenosine deaminase.

[0492] In some embodiments, the adenosine deaminase comprises an I156X mutation in a TadA reference sequence, or a corresponding mutation in another adenosine deaminase, where X indicates any amino acid other than the corresponding amino acid in the wild-type adenosine deaminase. In some embodiments, the adenosine deaminase comprises an I156F mutation in a TadA reference sequence, or a corresponding mutation in another adenosine deaminase.

[0493] In some embodiments, the adenosine deaminase comprises one, two, three, four, five, six, or seven mutations selected from the group consisting of L84X, A106X, D108X, H123X, D147X, E155X, and I156X in a TadA reference sequence, or a corresponding mutation or mutations in another adenosine deaminase, where X indicates the presence of any amino acid other than the corresponding amino acid in the wild-type adenosine deaminase. In some embodiments, the adenosine deaminase comprises one, two, three, four, five, or six mutations selected from the group consisting of S2X, I49X, A106X, D108X, D147X, and E155X in a TadA reference sequence, or a corresponding mutation or mutations in another adenosine deaminase, where X indicates the presence of any amino acid other than the corresponding amino acid in the wild-type adenosine deaminase. In some embodiments, the adenosine deaminase comprises one, two, three, four, or five mutations selected from the group consisting of H8X, A106X, D108X, N127X, and K160X in a TadA reference sequence, or a corresponding mutation or mutations in another adenosine deaminase, where X indicates the presence of any amino acid other than the corresponding amino acid in the wild-type adenosine deaminase.

[0494] In some embodiments, the adenosine deaminase comprises one, two, three, four, five, six, or seven mutations selected from the group consisting of L84F, A106V, D108N, H123Y, D147Y, E155V, and I156F in a TadA reference sequence, or a corresponding mutation or mutations in another adenosine deaminase. In some embodiments, the adenosine deaminase comprises one, two, three, four, five, or six mutations selected from the group consisting of S2A, I49F, A106V, D108N, D147Y, and E155V in a TadA reference sequence.

[0495] In some embodiments, the adenosine deaminase comprises one, two, three, four, or five mutations selected from the group consisting of H8Y, A106T, D108N, N127S, and K160S in a TadA reference sequence, or a corresponding mutation or mutations in another adenosine deaminase.

[0496] In some embodiments, the adenosine deaminase comprises one or more of a E25X, R26X, R107X, A142X, and/or A143X mutation in a TadA reference sequence, or one or more corresponding mutations in another adenosine deaminase, where the presence of X indicates any amino acid other than the corresponding amino acid in the wild-type adenosine deaminase. In some embodiments, the adenosine deaminase comprises one or more of E25M, E25D, E25A, E25R, E25V, E25S, E25Y, R26G, R26N, R26Q, R26C, R26L, R26K, R107P, R107K, R107A, R107N, R107W, R107H, R107S, A142N, A142D, A142G, A143D, A143G, A143E, A143L, A143W, A143M, A143S, A143Q, and/or A143R mutation in a TadA reference sequence, or one or more corresponding mutations in another adenosine deaminase. In some embodiments, the adenosine deaminase comprises one or more of the mutations described herein corresponding to a TadA reference sequence, or one or more corresponding mutations in another adenosine deaminase.

[0497] In some embodiments, the adenosine deaminase comprises an E25X mutation in a TadA reference sequence, or a corresponding mutation in another adenosine deaminase, where X indicates any amino acid other than the corresponding amino acid in the wild-type adenosine deaminase. In some embodiments, the adenosine deaminase comprises an E25M, E25D, E25A, E25R, E25V, E25S, or E25Y mutation in a TadA reference sequence, or a corresponding mutation in another adenosine deaminase (e.g., ecTadA).

[0498] In some embodiments, the adenosine deaminase comprises an R26X mutation in a TadA reference sequence, or a corresponding mutation in another adenosine deaminase, where X indicates any amino acid other than the corresponding amino acid in the wild-type adenosine deaminase. In some embodiments, the adenosine deaminase comprises R26G, R26N, R26Q, R26C, R26L, or R26K mutation in a TadA reference sequence, or a corresponding mutation in another adenosine deaminase (e.g., ecTadA).

[0499] In some embodiments, the adenosine deaminase comprises an R107X mutation in a TadA reference sequence, or a corresponding mutation in another adenosine deaminase, where X indicates any amino acid other than the corresponding amino acid in the wild-type adenosine deaminase. In some embodiments, the adenosine deaminase comprises an R107P, R107K, RT07A, RT07N, RT07W, RT07H, or RT07S mutation in a TadA reference sequence, or a corresponding mutation in another adenosine deaminase (e.g., ecTadA).

[0500] In some embodiments, the adenosine deaminase comprises an A142X mutation in a TadA reference sequence, or a corresponding mutation in another adenosine deaminase, where X indicates any amino acid other than the corresponding amino acid in the wild-type adenosine deaminase. In some embodiments, the adenosine deaminase comprises an A142N, A142D, A142G, mutation in a TadA reference sequence, or a corresponding mutation in another adenosine deaminase (e.g., ecTadA).

[0501] In some embodiments, the adenosine deaminase comprises an A143X mutation in a TadA reference sequence, or a corresponding mutation in another adenosine deaminase, where X indicates any amino acid other than the corresponding amino acid in the wild-type adenosine deaminase. In some embodiments, the adenosine deaminase comprises an A143D, A143G, A143E, A143L, A143W, A143M, A143S, A143Q, and/or A143R mutation in a TadA reference sequence, or a corresponding mutation in another adenosine deaminase (e.g., ecTadA).

[0502] In some embodiments, the adenosine deaminase comprises one or more of a H36X, N37X, P48X, I49X, R51X, M70X, N72X, D77X, E134X, S146X, Q154X, K157X, and/or K161X mutation in a TadA reference sequence, or one or more corresponding mutations in another adenosine deaminase, where the presence of X indicates any amino acid other than the corresponding amino acid in the wild-type adenosine deaminase. In some embodiments, the adenosine deaminase comprises one or more of H36L, N37T, N37S, P48T, P48L, I49V, R51H, R51L, M70L, N72S, D77G, E134G, S146R, S146C, Q154H, K157N, and/or K161T mutation in a TadA reference sequence, or one or more corresponding mutations in another adenosine deaminase (e.g., ecTadA).

[0503] In some embodiments, the adenosine deaminase comprises an H36X mutation in a TadA reference sequence, or a corresponding mutation in another adenosine deaminase, where X indicates any amino acid other than the corresponding amino acid in the wild-type adenosine deaminase. In some embodiments, the adenosine deaminase comprises an H36L mutation in a TadA reference sequence, or a corresponding mutation in another adenosine deaminase.

[0504] In some embodiments, the adenosine deaminase comprises an N37X mutation in a TadA reference sequence, or a corresponding mutation in another adenosine deaminase, where X indicates any amino acid other than the corresponding amino acid in the wild-type adenosine deaminase. In some embodiments, the adenosine deaminase comprises an N37T or N37S mutation in a TadA reference sequence, or a corresponding mutation in another adenosine deaminase.

[0505] In some embodiments, the adenosine deaminase comprises an P48X mutation in a TadA reference sequence, or a corresponding mutation in another adenosine deaminase, where X indicates any amino acid other than the corresponding amino acid in the wild-type adenosine deaminase. In some embodiments, the adenosine deaminase comprises an P48T or P48L mutation in a TadA reference sequence, or a corresponding mutation in another adenosine deaminase.

[0506] In some embodiments, the adenosine deaminase comprises an R51X mutation in a TadA reference sequence, or a corresponding mutation in another adenosine deaminase, where X indicates any amino acid other than the corresponding amino acid in the wild-type adenosine deaminase. In some embodiments, the adenosine deaminase comprises an R51H or R51L mutation in a TadA reference sequence, or a corresponding mutation in another adenosine deaminase.

[0507] In some embodiments, the adenosine deaminase comprises an S146X mutation in a TadA reference sequence, or a corresponding mutation in another adenosine deaminase, where X indicates any amino acid other than the corresponding amino acid in the wild-type adenosine deaminase. In some embodiments, the adenosine deaminase comprises an S146R or S146C mutation in a TadA reference sequence, or a corresponding mutation in another adenosine deaminase.

[0508] In some embodiments, the adenosine deaminase comprises an K157X mutation in a TadA reference sequence, or a corresponding mutation in another adenosine deaminase, where X indicates any amino acid other than the corresponding amino acid in the wild-type adenosine deaminase. In some embodiments, the adenosine deaminase comprises a K157N mutation in a TadA reference sequence, or a corresponding mutation in another adenosine deaminase.

[0509] In some embodiments, the adenosine deaminase comprises an P48X mutation in a TadA reference sequence, or a corresponding mutation in another adenosine deaminase, where X indicates any amino acid other than the corresponding amino acid in the wild-type adenosine deaminase. In some embodiments, the adenosine deaminase comprises a P48S, P48T, or P48A mutation in a TadA reference sequence, or a corresponding mutation in another adenosine deaminase.

[0510] In some embodiments, the adenosine deaminase comprises an A142X mutation in a TadA reference sequence, or a corresponding mutation in another adenosine deaminase, where X indicates any amino acid other than the corresponding amino acid in the wild-type adenosine deaminase. In some embodiments, the adenosine deaminase comprises a A142N mutation in a TadA reference sequence, or a corresponding mutation in another adenosine deaminase.

[0511] In some embodiments, the adenosine deaminase comprises an W23X mutation in a TadA reference sequence, or a corresponding mutation in another adenosine deaminase, where X indicates any amino acid other than the corresponding amino acid in the wild-type adenosine deaminase. In some embodiments, the adenosine deaminase comprises a W23R or W23L mutation in a TadA reference sequence, or a corresponding mutation in another adenosine deaminase.

[0512] In some embodiments, the adenosine deaminase comprises an R152X mutation in a TadA reference sequence, or a corresponding mutation in another adenosine deaminase, where X indicates any amino acid other than the corresponding amino acid in the wild-type adenosine deaminase. In some embodiments, the adenosine deaminase comprises a R152P or R52H mutation in a TadA reference sequence, or a corresponding mutation in another adenosine deaminase.

[0513] In one embodiment, the adenosine deaminase may comprise the mutations H36L, R51L, L84F, A106V, D108N, H123Y, S146C, D147Y, E155V, I156F, and K157N. In some embodiments, the adenosine deaminase comprises the following combination of mutations relative to a TadA reference sequence, where each mutation of a combination is separated by a “_” and each combination of mutations is between parentheses:
[0514] (A106V_D108N),
[0515] (R107C_D108N),
[0516] (H8Y_D108N_N127S_D147Y_Q154H),
[0517] (H8Y_D108N_N127S_D147Y_E155V),
[0518] (D108N_D147Y_E155V),
[0519] (H8Y_D108N_N127S),
[0520] (H8Y_D108N_N127S_D147Y_Q154H),
[0521] (A106V_D108N_D147Y_E155V),
[0522] (D108Q_D147Y_E155V),
[0523] (D108M_D147Y_E155V),
[0524] (D108L_D147Y_E155V),
[0525] (D108K_D147Y_E155V),
[0526] (D108I_D147Y_E155V),
[0527] (D108F_D147Y_E155V),
[0528] (A106V_D108N_D147Y),
[0529] (A106V_D108M_D147Y_E155V),
[0530] (E59A_A106V_D108N_D147Y_E155V),
[0531] (E59A cat dead_A106V_D108N_D147Y_E155V),
[0532] (L84F_A106V_D108N_H123Y_D147Y_E155V_I156Y),
[0533] (L84F_A106V_D108N_H123Y_D147Y_E155V_I156F),
[0534] (D103A_D104N),
[0535] (G22P_D103A_D104N),
[0536] (D103A_D104N_S138A),
[0537] (R26G_L84F_A106V_R107H_D108N_H123Y_A142N_A143D_D147Y_E155V_I156F),
[0538] (E25G_R26G_L84F_A106V_R107H_D108N_H123Y_A142N_A143D_D147Y_E155V_I156F),
[0539] (E25D_R26G_L84F_A106V_R107K_D108N_H123Y_A142N_A143G_D147Y_E155V_I156F),
[0540] (R26Q_L84F_A106V_D108N_H123Y_A142N_D147Y_E155V_I156F),
[0541] (E25M_R26G_L84F_A106V_R107P_D108N_H123Y_A142N_A143D_D147Y_E155V_I156F),
[0542] (R26C_L84F_A106V_R107H_D108N_H123Y_A142N_D147Y_E155V_I156F),
[0543] (L84F_A106V_D108N_H123Y_A142N_A143L_D147Y_E155V_I156F),
[0544] (R26G_L84F_A106V_D108N_H123Y_A142N_D147Y_E155V_I156F),
[0545] (E25A_R26G_L84F_A106V_R107N_D108N_H123Y_A142N_A143E_D147Y_E155V_I156F),
[0546] (R26G_L84F_A106V_R107H_D108N_H123Y_A142N_A143D_D147Y_E155V_I156F),
[0547] (A106V_D108N_A142N_D147Y_E155V),
[0548] (R26G_A106V_D108N_A142N_D147Y_E155V),
[0549] (E25D_R26G_A106V_R107K_D108N_A142N_A143G_D147Y_E155V),
[0550] (R26G_A106V_D108N_R107H_A142N_A143D_D147Y_E155V),
[0551] (E25D_R26G_A106V_D108N_A142N_D147Y_E155V),
[0552] (A106V_R107K_D108N_A142N_D147Y_E155V),
[0553] (A106V_D108N_A142N_A143G_D147Y_E155V),
[0554] (A106V_D108N_A142N_A143L_D147Y_E155V),
[0555] (H36L_R51L_L84F_A106V_D108N_H123Y_S146C_D147Y_E155V_I156F_K157N),
[0556] (N37T_P48T_M70L_L84F_A106V_D108N_H123Y_D147Y_149V_E155V_1156F),
[0557] (N37S_L84F_A106V_D108N_H123Y_D147Y_E155V_I156F_K161T),
[0558] (H36L_L84F_A106V_D108N_H123Y_D147Y_Q154H_E155V_I156F),
[0559] (N72S_L84F_A106V_D108N_H123Y_S146R_D147Y_E155V_I156F),
[0560] (H36L_P48L_L84F_A106V_D108N_H123Y_E134G_D147Y_E155V_I156F),
[0561] (H36L_L84F_A106V_D108N_H123Y_D147Y_E155V_I156F_K157N)
[0562] (H36L_L84F_A106V_D108N_H123Y_S146C_D147Y_E155V_I156F),
[0563] (L84F_A106V_D108N_H123Y_S146R_D147Y_E155V_I156F_K161T),
[0564] (N37S_R51H_D77G_L84F_A106V_D108N_H123Y_D147Y_E155V_I156F),
[0565] (R51L_L84F_A106V_D108N_H123Y_D147Y_E155V_I156F_K157N),
[0566] (D24G_Q71R_L84F_H96L_A106V_D108N_H123Y_D147Y_E155V_I156F_K160E),
[0567] (H36L_G67V_L84F_A106V_D108N_H123Y_S146T_D147Y_E155V_I156F),
[0568] (Q71L_L84F_A106V_D108N_H123Y_L137M_A143E_D147Y_E155V_I156F),
[0569] (E25G_L84F_A106V_D108N_H123Y_D147Y_E155V_I156F_Q159L),
[0570] (L84F_A91T_F104I_A106V_D108N_H123Y_D147Y_E155V_I156F),
[0571] (N72D_L84F_A106V_D108N_H123Y_G125A_D147Y_E155V_I156F),
[0572] (P48S_L84F_S97C_A106V_D108N_H123Y_D147Y_E155V_I156F),
[0573] (W23G_L84F_A106V_D108N_H123Y_D147Y_E155V_I156F),
[0574] (D24G_P48L_Q71R_L84F_A106V_D108N_H123Y_D147Y_E155V_I156F_Q159L),
[0575] (L84F_A106V_D108N_H123Y_A142N_D147Y_E155V_I156F),
[0576] (H36L_R51L_L84F_A106V_D108N_H123Y_A142N_S146C_D147Y_E155V_I156F_K157N),
[0577] (N37S_L84F_A106V_D108N_H123Y_A142N_D147Y_E155V_I156F_K161T),
[0578] (L84F_A106V_D108N_D147Y_E155V_I156F),
[0579] (R51L_L84F_A106V_D108N_H123Y_S146C_D147Y_E155V_I156F_K157N_K161T),
[0580] (L84F_A106V_D108N_H123Y_S146C_D147Y_E155V_I156F_K161T),
[0581] (L84F_A106V_D108N_H123Y_S146C_D147Y_E155V_I156F_K157N_K160E_K161T),
[0582] (L84F_A106V_D108N_H123Y_S146C_D147Y_E155V_1156F_K157N_K160E),
[0583] (R74Q_L84F_A106V_D108N_H123Y_D147Y_E155V_I156F),
[0584] (R74A_L84F_A106V_D108N_H123Y_D147Y_E155V_I156F),
[0585] (L84F_A106V_D108N_H123Y_D147Y_E155V_I156F),
[0586] (R74Q_L84F_A106V_D108N_H123Y_D147Y_E155V_I156F),
[0587] (L84F_R98Q_A106V_D108N_H123Y_D147Y_E155V_I156F),
[0588] (L84F_A106V_D108N_H123Y_R129Q_D147Y_E155V_I156F),
[0589] (P48S_L84F_A106V_D108N_H123Y_A142N_D147Y_E155V_I156F),
[0590] (P48S_A142N),
[0591] (P48T_I49V_L84F_A106V_D108N_H123Y_A142N_D147Y_E155V_I156F_L157N),
[0592] (P48T_I49V_A142N),
[0593] (H36L_P48S_R51L_L84F_A106V_D108N_H123Y_S146C_D147Y_E155V_I156F_K157N),
[0594] (H36L_P48S_R51L_L84F_A106V_D108N_H123Y_S146C_A142N_D147Y_E155V_I156F
[0595] (H36L_P48T_I49V_R51L_L84F_A106V_D108N_H123Y_S146C_D147Y_E155V_I156F_K157N),
[0596] (H36L_P48T_I49V_R51L_L84F_A106V_D108N_H123Y_A142N_S146C_D147Y_E155V_I156F_K157N),
[0597] (H36L_P48A_R51L_L84F_A106V_D108N_H123Y_S146C_D147Y_E155V_I156F_K157N),
[0598] (H36L_P48A_R51L_L84F_A106V_D108N_H123Y_A142N_S146C_D147Y_E155V_I156F_K157N),
[0599] (H36L_P48A_R51L_L84F_A106V_D108N_H123Y_S146C_A142N_D147Y_E155V_I156F_K157N),
[0600] (W23L_H36L_P48A_R51L_L84F_A106V_D108N_H123Y_S146C_D147Y_E155V_I156F_K157N),
[0601] (W23R_H36L_P48A_R51L_L84F_A106V_D108N_H123Y_S146C_D147Y_E155V_I156F_K157N),
[0602] (W23L_H36L_P48A_R51L_L84F_A106V_D108N_H123Y_S146R_D147Y_E155V_I156F_K161T),
[0603] (H36L_P48A_R51L_L84F_A106V_D108N_H123Y_S146C_D147Y_R152H_E155V_I156F_K157N),
[0604] (H36L_P48A_R51L_L84F_A106V_D108N_H123Y_S146C_D147Y_R152P_E155V_I156F_K157N),
[0605] (W23L_H36L_P48A_R51L_L84F_A106V_D108N_H123Y_S146C_D147Y_R152P_E155V_I156F_K157N),
[0606] (W23L_H36L_P48A_R51L_L84F_A106V_D108N_H123Y_A142A_S146C_D147Y_E155V_I156F_K157N),
[0607] (W23L_H36L_P48A_R51L_L84F_A106V_D108N_H123Y_A142A_S146C_D147Y_R152P_E155V_I156F_K157N),
[0608] (W23L_H36L_P48A_R51L_L84F_A106V_D108N_H123Y_S146R_D147Y_E155V_I156F_K161T),
[0609] (W23R_H36L_P48A_R51L_L84F_A106V_D108N_H123Y_S146C_D147Y_R152P_E155V_I156F_K157N), (H36L_P48A_R51L_L84F_A106V_D108N_H123Y_A142N_S146C_D147Y_R152P_E155V_I156F_K157N).

[0610] In some embodiments, the TadA deaminase is a TadA variant. In some embodiments, the TadA variant is TadA*7.10. In particular embodiments, the fusion proteins or complexes comprise a single TadA*7.10 domain (e.g., provided as a monomer). In other embodiments, the fusion protein comprises TadA*7.10 and TadA(wt), which are capable of forming heterodimers.

[0611] In one embodiment, a fusion protein of the present disclosure comprises a wild-type TadA linked to TadA*7.10, which is linked to Cas9 nickase.

[0612] In some embodiments, TadA*7.10 comprises at least one alteration. In some embodiments, the adenosine deaminase comprises an alteration in the following sequence:

TadA*7.10
(SEQ ID NO: 1)
MSEVEFSHEYWMRHALTLAKRARDEREVPVGAVLVLNNRVIGEGWNRAI
GLHDPTAHAEIMALRQGGLVMQNYRLIDATLYVTFEPCVMCAGAMIHSR
IGRVVFGVRNAKTGAAGSLMDVLHYPGMNHRVEITEGILADECAALLCY
FFRMPRQVFNAQKKAQSSTD

[0613] In some embodiments, TadA*7.10 comprises an alteration at amino acid 82 and/or 166.

[0614] In particular embodiments, TadA*7.10 comprises one or more of the following alterations: Y147T, Y147R, Q154S, Y123H, V82S, T166R, and/or Q154R. In other embodiments, a variant of TadA*7.10 comprises a combination of alterations selected from the group of: Y147T+Q154R; Y147T+Q154S; Y147R+Q154S; V82S+Q154S; V82S+Y147R; V82S+Q154R; V82S+Y123H; I76Y+V82S; V82S+Y123H+Y147T; V82S+Y123H+Y147R; V82S+Y123H+Q154R; Y147R+Q154R+Y123H; Y147R+Q154R+176Y; Y147R+Q154R+T166R; Y123H+Y147R+Q154R+I76Y; V82S+Y123H+Y147R+Q154R; and I76Y+V82S+Y123H+Y147R+Q154R.

[0615] In some embodiments, a variant of TadA*7.10 comprises one or more of alterations selected from the group of L36H, I76Y, V82G, Y147T, Y147D, F149Y, Q154S, N157K, and/or D167N. In some embodiments, a variant of TadA*7.10 comprises V82G, Y147T/D, Q154S, and one or more of L36H, I76Y, F149Y, N157K, and D167N. In other embodiments, a variant of TadA*7.10 comprises a combination of alterations selected from the group of: V82G+Y147T+Q154S; I76Y+V82G+Y147T+Q154S; L36H+V82G+Y147T+Q154S+N157K; V82G+Y147D+F149Y+Q154S+D167N; L36H+V82G+Y147D+F149Y+Q154S+N157K+D167N; L36H+I76Y+V82G+Y147T+Q154S+N157K; I76Y+V82G+Y147D+F149Y+Q154S+D167N; L36H+I76Y+V82G+Y147D+F149Y+Q154S+N157K+D167N.

[0616] In some embodiments, an adenosine deaminase variant (e.g., TadA*8) comprises a deletion. In some embodiments, an adenosine deaminase variant comprises a deletion of the C terminus. In particular embodiments, an adenosine deaminase variant comprises a deletion of the C terminus beginning at residue 149, 150, 151, 152, 153, 154, 155, 156, and 157, relative to a TadA reference sequence (e.g., TadA*7.10 (SEQ ID NO: 1), the TadA reference sequence, or a corresponding mutation in another TadA.

[0617] In other embodiments, an adenosine deaminase variant (e.g., TadA*8) is a monomer comprising one or more of the following alterations: Y147T, Y147R, Q154S, Y123H, V82S, T166R, and/or Q154R, relative to a TadA reference sequence (e.g., TadA*7.10 (SEQ ID NO: 1), or a corresponding mutation in another TadA. In other embodiments, the adenosine deaminase variant (TadA*8) is a monomer comprising a combination of alterations selected from the group of: Y147T+Q154R; Y147T+Q154S; Y147R+Q154S; V82S+Q154S; V82S+Y147R; V82S+Q154R; V82S+Y123H; I76Y+V82S; V82S+Y123H+Y147T; V82S+Y123H+Y147R; V82S+Y123H+Q154R; Y147R+Q154R+Y123H; Y147R+Q154R+176Y; Y147R+Q154R+T166R; Y123H+Y147R+Q154R+I76Y; V82S+Y123H+Y147R+Q154R; and I76Y+V82S+Y123H+Y147R+Q154R, relative to a TadA reference sequence (e.g., TadA*7.10 (SEQ ID NO: 1), or a corresponding mutation in another TadA.

[0618] In other embodiments, the adenosine deaminase variant is a homodimer comprising two adenosine deaminase domains (e.g., TadA*8) each having one or more of the following alterations Y147T, Y147R, Q154S, Y123H, V82S, T166R, and/or Q154R, relative to a TadA reference sequence (e.g., TadA*7.10 (SEQ ID NO: 1), or a corresponding mutation in another TadA. In other embodiments, the adenosine deaminase variant is a homodimer comprising two adenosine deaminase domains (e.g., TadA*8) each having a combination of alterations selected from the group of: Y147T+Q154R; Y147T+Q154S; Y147R+Q154S; V82S+Q154S; V82S+Y147R; V82S+Q154R; V82S+Y123H; I76Y+V82S; V82S+Y123H+Y147T; V82S+Y123H+Y147R; V82S+Y123H+Q154R; Y147R+Q154R+Y123H; Y147R+Q154R+I76Y; Y147R+Q154R+T166R; Y123H+Y147R+Q154R+I76Y; V82S+Y123H+Y147R+Q154R; and I76Y+V82S+Y123H+Y147R+Q154R, relative to a TadA reference sequence (e.g., TadA*7.10 (SEQ ID NO: 1), or a corresponding mutation in another TadA.

[0619] In other embodiments, a base editor of the disclosure comprising an adenosine deaminase variant (e.g., TadA*8) monomer comprising one or more of the following alterations: R26C, V88A, A109S, T111R, D119N, H122N, Y147D, F149Y, T166I and/or D167N, relative to a TadA reference sequence (e.g., TadA*7.10 (SEQ ID NO: 1), or a corresponding mutation in another TadA. In other embodiments, the adenosine deaminase variant (TadA*8) monomer comprises a combination of alterations selected from the group of: R26C+A109S+T111R+D119N+H122N+Y147D+F149Y+T1661+D167N; V88A+A109S+T111R+D119N+H122N+F149Y+T1661+D167N; R26C+A109S+T111R+D119N+H122N+F149Y+T166I+D167N; V88A+T111R+D119N+F149Y; and A109S+T111R+D119N+H122N+Y147D+F149Y+T166I+D167N, relative to a TadA reference sequence (e.g., TadA*7.10 (SEQ ID NO: 1), or a corresponding mutation in another TadA.

[0620] In some embodiments, an adenosine deaminase variant (e.g., MSP828) is a monomer comprising one or more of the following alterations L36H, I76Y, V82G, Y147T, Y147D, F149Y, Q154S, N157K, and/or D167N, relative to a TadA reference sequence (e.g., TadA*7.10 (SEQ ID NO: 1), or a corresponding mutation in another TadA. In some embodiments, an adenosine deaminase variant (e.g., MSP828) is a monomer comprising V82G, Y147T/D, Q154S, and one or more of L36H, I76Y, F149Y, N157K, and D167N, relative to a TadA reference sequence (e.g., TadA*7.10 (SEQ ID NO: 1), or a corresponding mutation in another TadA. In other embodiments, the adenosine deaminase variant (TadA variant) is a monomer comprising a combination of alterations selected from the group of: V82G+Y147T+Q154S; I76Y+V82G+Y147T+Q154S; L36H+V82G+Y147T+Q154S+N157K; V82G+Y147D+F149Y+Q154S+D167N; L36H+V82G+Y147D+F149Y+Q154S+N157K+D167N; L36H+I76Y+V82G+Y147T+Q154S+N157K; I76Y+V82G+Y147D+F149Y+Q154S+D167N; L36H+I76Y+V82G+Y147D+F149Y+Q154S+N157K+D167N, relative to a TadA reference sequence (e.g., TadA*7.10 (SEQ ID NO: 1), or a corresponding mutation in another TadA.

[0621] In other embodiments, the adenosine deaminase variant is a heterodimer of a wild-type adenosine deaminase domain and an adenosine deaminase variant domain (e.g., TadA*8) comprising one or more of the following alterations Y147T, Y147R, Q154S, Y123H, V82S, T166R, and/or Q154R, relative to a TadA reference sequence (e.g., TadA*7.10 (SEQ ID NO: 1), or a corresponding mutation in another TadA. In other embodiments, the adenosine deaminase variant is a heterodimer of a wild-type adenosine deaminase domain and an adenosine deaminase variant domain (e.g., TadA*8) comprising a combination of alterations selected from the group of Y147T+Q154R; Y147T+Q154S; Y147R+Q154S; V82S+Q154S; V82S+Y147R; V82S+Q154R; V82S+Y123H; I76Y+V82S; V82S+Y123H+Y147T; V82S+Y123H+Y147R; V82S+Y123H+Q154R; Y147R+Q154R+Y123H; Y147R+Q154R+I76Y; Y147R+Q154R+T166R; Y123H+Y147R+Q154R+I76Y; V82S+Y123H+Y147R+Q154R; and I76Y+V82S+Y123H+Y147R+Q154R, relative a TadA reference sequence (e.g., TadA*7.10 (SEQ ID NO: 1), or a corresponding mutation in another TadA.

[0622] In other embodiments, a base editor of the disclosure comprising an adenosine deaminase variant (e.g., TadA*8) homodimer comprising two adenosine deaminase domains (e.g., TadA*8) each having one or more of the following alterations R26C, V88A, A109S, T111R, D119N, H122N, Y147D, F149Y, T166I and/or D167N, relative to a TadA reference sequence (e.g., TadA*7.10 (SEQ ID NO: 1), or a corresponding mutation in another TadA. In other embodiments, the adenosine deaminase variant is a homodimer comprising two adenosine deaminase domains (e.g., TadA*8) each having a combination of alterations selected from the group of: R26C+A109S+T111R+D119N+H122N+Y147D+F149Y+T166I+D167N; V88A+A109S+T111R+D119N+H122N+F149Y+T166I+D167N; R26C+A109S+T111R+D119N+H122N+F149Y+T166I+D167N; V88A+T111R+D119N+F149Y; and A109S+T111R+D119N+H122N+Y147D+F149Y+T166I+D167N, relative to a TadA reference sequence (e.g., TadA*7.10 (SEQ ID NO: 1), or a corresponding mutation in another TadA.

[0623] In some embodiments, an adenosine deaminase variant is a homodimer comprising two adenosine deaminase domains (e.g., TadA*7.10) each having one or more of the following alterations L36H, I76Y, V82G, Y147T, Y147D, F149Y, Q154S, N157K, and/or D167N, relative to a TadA reference sequence (e.g., TadA*7.10 (SEQ ID NO: 1), or a corresponding mutation in another TadA. In some embodiments, an adenosine deaminase variant is a homodimer comprising two adenosine deaminase variant domains (e.g., MSP828) each having the following alterations V82G, Y147T/D, Q154S, and one or more of L36H, I76Y, F149Y, N157K, and D167N, relative to a TadA reference sequence (e.g., TadA*7.10 (SEQ ID NO: 1), or a corresponding mutation in another TadA. In other embodiments, the adenosine deaminase variant is a homodimer comprising two adenosine deaminase domains (e.g., TadA*7.10) each having a combination of alterations selected from the group of: V82G+Y147T+Q154S; I76Y+V82G+Y147T+Q154S; L36H+V82G+Y147T+Q154S+N157K; V82G+Y147D+F149Y+Q154S+D167N; L36H+V82G+Y147D+F149Y+Q154S+N157K+D167N; L36H+I76Y+V82G+Y147T+Q154S+N157K; I76Y+V82G+Y147D+F149Y+Q154S+D167N; L36H+I76Y+V82G+Y147D+F149Y+Q154S+N157K+D167N, relative to a TadA reference sequence (e.g., TadA*7.10 (SEQ ID NO: 1), or a corresponding mutation in another TadA.

[0624] In other embodiments, the adenosine deaminase variant is a heterodimer of a TadA*7.10 domain and an adenosine deaminase variant domain (e.g., TadA*8) comprising one or more of the following alterations Y147T, Y147R, Q154S, Y123H, V82S, T166R, and/or Q154R, relative to a TadA reference sequence (e.g., TadA*7.10 (SEQ ID NO: 1), or a corresponding mutation in another TadA. In other embodiments, the adenosine deaminase variant is a heterodimer of a TadA*7.10 domain and an adenosine deaminase variant domain (e.g., TadA*8) comprising a combination of alterations selected from the group of: Y147T+Q154R; Y147T+Q154S; Y147R+Q154S; V82S+Q154S; V82S+Y147R; V82S+Q154R; V82S+Y123H; I76Y+V82S; V82S+Y123H+Y147T; V82S+Y123H+Y147R; V82S+Y123H+Q154R; Y147R+Q154R+Y123H; Y147R+Q154R+176Y; Y147R+Q154R+T166R; Y123H+Y147R+Q154R+I76Y; V82S+Y123H+Y147R+Q154R; and I76Y+V82S+Y123H+Y147R+Q154R, relative to a TadA reference sequence (e.g., TadA*7.10 (SEQ ID NO: 1), or a corresponding mutation in another TadA.

[0625] In other embodiments, a base editor comprises a heterodimer of a wild-type adenosine deaminase domain and an adenosine deaminase variant domain (e.g., TadA*8) comprising one or more of the following alterations R26C, V88A, A109S, T111R, D119N, H122N, Y147D, F149Y, T166I and/or D167N, relative to a TadA reference sequence (e.g., TadA*7.10 (SEQ ID NO: 1), or a corresponding mutation in another TadA. In other embodiments, the base editor comprises a heterodimer of a wild-type adenosine deaminase domain and an adenosine deaminase variant domain (e.g., TadA*8) comprising a combination of alterations selected from the group of: R26C+A109S+T111R+D119N+H122N+Y147D+F149Y+T166I+D167N; V88A+A109S+T111R+D119N+H122N+F149Y+T166I+D167N; R26C+A109S+T111R+D119N+H122N+F149Y+T1661+D167N; V88A+T111R+D119N+F149Y; and A109S+T111R+D119N+H122N+Y147D+F149Y+T166I+D167N, relative to a TadA reference sequence (e.g., TadA*7.10 (SEQ ID NO: 1), or a corresponding mutation in another TadA.

[0626] In other embodiments, the adenosine deaminase variant is a heterodimer of a wild-type adenosine deaminase domain and an adenosine deaminase variant domain (e.g., TadA*7.10) comprising one or more of the following alterations L36H, I76Y, V82G, Y147T, Y147D, F149Y, Q154S, N157K, and/or D167N, relative to a TadA reference sequence (e.g., TadA*7.10 (SEQ ID NO: 1), or a corresponding mutation in another TadA. In some embodiments, an adenosine deaminase variant is a heterodimer comprising a wild-type adenosine deaminase domain and an adenosine deaminase variant domain (e.g., MSP828) having the following alterations V82G, Y147T/D, Q154S, and one or more of L36H, I76Y, F149Y, N157K, and D167N, relative to a TadA reference sequence (e.g., TadA*7.10 (SEQ ID NO: 1), or a corresponding mutation in another TadA. In other embodiments, the adenosine deaminase variant is a heterodimer of a wild-type adenosine deaminase domain and an adenosine deaminase variant domain (e.g., TadA*7.10) comprising a combination of alterations selected from the group of: V82G+Y147T+Q154S; I76Y+V82G+Y147T+Q154S; L36H+V82G+Y147T+Q154S+N157K; V82G+Y147D+F149Y+Q154S+D167N; L36H+V82G+Y147D+F149Y+Q154S+N157K+D167N; L36H+176Y+V82G+Y147T+Q154S+N157K; 176Y+V82G+Y147D+F149Y+Q154S+D167N; L36H+I76Y+V82G+Y147D+F149Y+Q154S+N157K+D167N, relative to a TadA reference sequence (e.g., TadA*7.10 (SEQ ID NO: 1), or a corresponding mutation in another TadA.

[0627] In other embodiments, the adenosine deaminase variant is a heterodimer of a TadA*7.10 domain and an adenosine deaminase variant domain (e.g., TadA*8) comprising one or more of the following alterations Y147T, Y147R, Q154S, Y123H, V82S, T166R, and/or Q154R, relative to a TadA reference sequence (e.g., TadA*7.10 (SEQ ID NO: 1), or a corresponding mutation in another TadA. In other embodiments, the adenosine deaminase variant is a heterodimer of a TadA*7.10 domain and an adenosine deaminase variant domain (e.g., TadA*8) comprising a combination of alterations selected from the group of: Y147T+Q154R; Y147T+Q154S; Y147R+Q154S; V82S+Q154S; V82S+Y147R; V82S+Q154R; V82S+Y123H; I76Y+V82S; V82S+Y123H+Y147T; V82S+Y123H+Y147R; V82S+Y123H+Q154R; Y147R+Q154R+Y123H; Y147R+Q154R+176Y; Y147R+Q154R+T166R; Y123H+Y147R+Q154R+I76Y; V82S+Y123H+Y147R+Q154R; and I76Y+V82S+Y123H+Y147R+Q154R, relative to a TadA reference sequence (e.g., TadA*7.10 (SEQ ID NO: 1), or a corresponding mutation in another TadA.

[0628] In particular embodiments, an adenosine deaminase heterodimer comprises a TadA*8 domain and an adenosine deaminase domain selected from Staphylococcus aureus (S. aureus) TadA, Bacillus subtilis (B. subtilis) TadA, Salmonella typhimurium (S. typhimurium) TadA, Shewanella putrefaciens (S. putrefaciens) TadA, Haemophilus influenzae F3031 (H. influenzae) TadA, Caulobacter crescentus (C. crescentus) TadA, Geobacter sulfurreducens (G. sulfurreducens) TadA, or TadA*7.10.

[0629] In some embodiments, an adenosine deaminase is a TadA*8. In one embodiment, an adenosine deaminase is a TadA*8 that comprises or consists essentially of the following sequence, or a fragment thereof having adenosine deaminase activity:

(SEQ ID NO: 316)
MSEVEFSHEYWMRHALTLAKRARDEREVPVGAVLVLNNRVIGEGWNRAI
GLHDPTAHAEIMALRQGGLVMQNYRLIDATLYVTFEPCVMCAGAMIHSR
IGRVVFGVRNAKTGAAGSLMDVLHYPGMNHRVEITEGILADECAALLCT
FFRMPRQVFNAQKKAQSSTD

[0630] In some embodiments, the TadA*8 is truncated. In some embodiments, the truncated TadA*8 is missing 1, 2, 3, 4, 5, 6, 7, 8, 9, 10, 11, 12, 13, 14, 15, 6, 17, 18, 19, or 20 N-terminal amino acid residues relative to the full length TadA*8. In some embodiments, the truncated TadA*8 is missing 1, 2, 3, 4, 5, 6, 7, 8, 9, 10, 11, 12, 13, 14, 15, 6, 17, 18, 19, or 20 C-terminal amino acid residues relative to the full length TadA*8. In some embodiments the adenosine deaminase variant is a full-length TadA*8.

[0631] In some embodiments the TadA*8 is TadA*8.1, TadA*8.2, TadA*8.3, TadA*8.4, TadA*8.5, TadA*8.6, TadA*8.7, TadA*8.8, TadA*8.9, TadA*8.10, TadA*8.11, TadA*8.12, TadA*8.13, TadA*8.14, TadA*8.15, TadA*8.16, TadA*8.17, TadA*8.18, TadA*8.19, TadA*8.20, TadA*8.21, TadA*8.22, TadA*8.23, or TadA*8.24.

[0632] In other embodiments, a base editor of the disclosure comprising an adenosine deaminase variant (e.g., TadA*8) monomer comprising one or more of the following alterations: R26C, V88A, A109S, T111R, D119N, H122N, Y147D, F149Y, T166I and/or D167N, relative to a TadA reference sequence (e.g., TadA*7.10 (SEQ ID NO: 1), or a corresponding mutation in another TadA. In other embodiments, the adenosine deaminase variant (TadA*8) monomer comprises a combination of alterations selected from the group of: R26C+A109S+T111R+D119N+H122N+Y147D+F149Y+T1661+D167N; V88A+A109S+T111R+D119N+H122N+F149Y+T1661+D167N; R26C+A109S+T111R+D119N+H122N+F149Y+T166I+D167N; V88A+T111R+D119N+F149Y; and A109S+T111R+D119N+H122N+Y147D+F149Y+T166I+D167N, relative to a TadA reference sequence (e.g., TadA*7.10 (SEQ ID NO: 1), or a corresponding mutation in another TadA.

[0633] In other embodiments, a base editor comprises a heterodimer of a wild-type adenosine deaminase domain and an adenosine deaminase variant domain (e.g., TadA*8) comprising one or more of the following alterations R26C, V88A, A109S, T111R, D119N, H122N, Y147D, F149Y, T166I and/or D167N, relative to a TadA reference sequence (e.g., TadA*7.10 (SEQ ID NO: 1), or a corresponding mutation in another TadA. In other embodiments, the base editor comprises a heterodimer of a wild-type adenosine deaminase domain and an adenosine deaminase variant domain (e.g., TadA*8) comprising a combination of alterations selected from the group of R26C+A109S+T111R+D119N+H122N+Y147D+F149Y+T1661+D167N; V88A+A109S+T111R+D119N+H122N+F149Y+T1661+D167N; R26C+A109S+T111R+D119N+H122N+F149Y+T1661+D167N; V88A+T111R+D119N+F149Y; and A109S+T111R+D119N+H122N+Y147D+F149Y+T166I+D167N, relative to a TadA reference sequence (e.g., TadA*7.10 (SEQ ID NO: 1), or a corresponding mutation in another TadA.

[0634] In other embodiments, a base editor comprises a heterodimer of a TadA*7.10 domain and an adenosine deaminase variant domain (e.g., TadA*8) comprising one or more of the following alterations R26C, V88A, A109S, T111R, D119N, H122N, Y147D, F149Y, T166I and/or D167N, relative to a TadA reference sequence (e.g., TadA*7.10 (SEQ ID NO: 1), or a corresponding mutation in another TadA. In other embodiments, the base editor comprises a heterodimer of a TadA*7.10 domain and an adenosine deaminase variant domain (e.g., TadA*8) comprising a combination of alterations selected from the group of: R26C+A109S+T111R+D119N+H122N+Y147D+F149Y+T166I+D167N; V88A+A109S+T111R+D119N+H122N+F149Y+T166I+D167N; R26C+A109S+T111R+D119N+H122N+F149Y+T166I+D167N; V88A+T111R+D119N+F149Y; and A109S+T111R+D119N+H122N+Y147D+F149Y+T166I+D167N, relative to a TadA reference sequence (e.g., TadA*7.10 (SEQ ID NO: 1), or a corresponding mutation in another TadA.

[0635] In some embodiments, the TadA*8 is a variant as shown in Table 5. Table 5 shows certain amino acid position numbers in the TadA amino acid sequence and the amino acids present in those positions in the TadA-7.10 adenosine deaminase. Table 5 also shows amino acid changes in TadA variants relative to TadA-7.10 following phage-assisted non-continuous evolution (PANCE) and phage-assisted continuous evolution (PACE), as described in M. Richter et al., 2020, Nature Biotechnology, doi.org/10.1038/s41587-020-0453-z, the entire contents of which are incorporated by reference herein. In some embodiments, the TadA*8 is TadA*8a, TadA*8b, TadA*8c, TadA*8d, or TadA*8e. In some embodiments, the TadA*8 is TadA*8e.

[0636] In other embodiments, the adenosine deaminase variant is a heterodimer of a TadA*7.10 domain and an adenosine deaminase variant domain (e.g., TadA*7.10) comprising one or more of the following alterations L36H, I76Y, V82G, Y147T, Y147D, F149Y, Q154S, N157K, and/or D167N, relative to a TadA reference sequence (e.g., TadA*7.10 (SEQ ID NO: 1), or a corresponding mutation in another TadA. In some embodiments, an adenosine deaminase variant is a heterodimer comprising a TadA*7.10 domain and an adenosine deaminase variant domain (e.g., MSP828) having the following alterations V82G, Y147T/D, Q154S, and one or more of L36H, I76Y, F149Y, N157K, and D167N, relative to a TadA reference sequence (e.g., TadA*7.10 (SEQ ID NO: 1), or a corresponding mutation in another TadA. In other embodiments, the adenosine deaminase variant is a heterodimer of a TadA*7.10 domain and an adenosine deaminase variant domain (e.g., TadA*7.10) comprising a combination of alterations selected from the group of: V82G+Y147T+Q154S; 176Y+V82G+Y147T+Q154S; L36H+V82G+Y147T+Q154S+N157K; V82G+Y147D+F149Y+Q154S+D167N; L36H+V82G+Y147D+F149Y+Q154S+N157K+D167N; L36H+176Y+V82G+Y147T+Q154S+N157K; 176Y+V82G+Y147D+F149Y+Q154S+D167N; L36H+176Y+V82G+Y147D+F149Y+Q154S+N157K+D167N, relative to a TadA reference sequence (e.g., TadA*7.10 (SEQ ID NO: 1), or a corresponding mutation in another TadA.

TABLE 5
Select TadA*8 Variants

| | | TadA amino acid number | | | | | | | | | |
|---|---|---|---|---|---|---|---|---|---|---|---|
| | TadA | 26 | 88 | 109 | 111 | 119 | 122 | 147 | 149 | 166 | 167 |
| | TadA-7.10 | R | V | A | T | D | H | Y | F | T | D |
| PANCE 1 | | | | | R | | | | | | |
| PANCE 2 | | | | S/T | R | | | | | | |
| PACE | TadA-8a | C | | S | R | N | N | D | Y | I | N |
| | TadA-8b | | A | S | R | N | N | | Y | I | N |
| | TadA-8c | C | | S | R | N | N | | Y | I | N |
| | TadA-8d | | A | | R | N | | | Y | | |
| | TadA-8e | | | S | R | N | N | D | Y | I | N |

[0637] In some embodiments, the TadA variant is a variant as shown in Table 5.1. Table 5.1 shows certain amino acid position numbers in the TadA amino acid sequence and the amino acids present in those positions in the TadA*7.10 adenosine deaminase. In some embodiments, the TadA variant is MSP605, MSP680, MSP823, MSP824, MSP825, MSP827, MSP828, or MSP829. In some embodiments, the TadA variant is MSP828. In some embodiments, the TadA variant is MSP829.

TABLE 5.1
TadA Variants

| | TadA Amino Acid Number | | | | | | | |
|---|---|---|---|---|---|---|---|---|
| Variant | 36 | 76 | 82 | 147 | 149 | 154 | 157 | 167 |
| TadA-7.10 | L | I | V | Y | F | Q | N | D |
| MSP605 | | | G | T | | S | | |
| MSP680 | | Y | G | T | | S | | |
| MSP823 | H | | G | T | | S | K | |
| MSP824 | | | G | D | Y | S | | N |
| MSP825 | H | | G | D | Y | S | K | N |
| MSP827 | H | Y | G | T | | S | K | |
| MSP828 | | Y | G | D | Y | S | | N |
| MSP829 | H | Y | G | D | Y | S | K | N |

[0638] In one embodiment, a fusion protein or complex of the present disclosure comprises a wild-type TadA is linked to an adenosine deaminase variant described herein (e.g., TadA*8), which is linked to Cas9 nickase. In particular embodiments, the fusion proteins or complexes comprise a single TadA*8 domain (e.g., provided as a monomer). In other embodiments, the fusion protein or complex comprises TadA*8 and TadA(wt), which are capable of forming heterodimers.

[0639] In some embodiments, the adenosine deaminase comprises an amino acid sequence that is at least 60%, at least 65%, at least 70%, at least 75%, at least 80%, at least 85%, at least 90%, at least 95%, at least 96%, at least 97%, at least 98%, at least 99%, or at least 99.5% identical to any one of the amino acid sequences set forth in any of the adenosine deaminases provided herein. It should be appreciated that adenosine deaminases provided herein may include one or more mutations (e.g., any of the mutations provided herein). The disclosure provides any deaminase domains with a certain percent identity plus any of the mutations or combinations thereof described herein. In some embodiments, the adenosine deaminase comprises an amino acid sequence that has 1, 2, 3, 4, 5, 6, 7, 8, 9, 10, 11, 12, 13, 14, 15, 16, 17, 18, 19, 20, 21, 22, 21, 24, 25, 26, 27, 28, 29, 30, 31, 32, 33, 34, 35, 36, 37, 38, 39, 40, 41, 42, 43, 44, 45, 46, 47, 48, 49, 50, or more mutations compared to a reference sequence, or any of the adenosine deaminases provided herein. In some embodiments, the adenosine deaminase comprises an amino acid sequence that has at least 5, at least 10, at least 15, at least 20, at least 25, at least 30, at least 35, at least 40, at least 45, at least 50, at least 60, at least 70, at least 80, at least 90, at least 100, at least 110, at least 120, at least 130, at least 140, at least 150, at least 160, or at least 170 identical contiguous amino acid residues as compared to any one of the amino acid sequences known in the art or described herein.

[0640] In particular embodiments, a TadA*8 comprises one or more mutations at any of the following positions shown in bold. In other embodiments, a TadA*8 comprises one or more mutations at any of the positions shown with underlining:

| (SEQ ID NO: 1) | |
|---|---|
| MSEVEFSHEY WMRHALTLAK RARDEREVPV GAVLVLNNRV IGEGWNRAIG | 50 |
| LHDPTAHAEI MALRQGGLVM QNYRLIDATL YVTFEPCVMC AGAMIHSRIG | 100 |
| RVVFGVRNAK TGAAGSLMDV LHYPGMNHRV EITEGILADE CAALLCYFFR | 150 |
| MPRQVFNAQK KAQSSTD | |

[0641] For example, the TadA*8 comprises alterations at amino acid position 82 and/or 166 (e.g., V82S, T166R) alone or in combination with any one or more of the following Y147T, Y147R, Q154S, Y123H, and/or Q154R, relative to a TadA reference sequence (e.g., TadA*7.10 (SEQ ID NO: 1)), or a corresponding mutation in another TadA. In particular embodiments, a combination of alterations is selected from the group of: Y147T+Q154R; Y147T+Q154S; Y147R+Q154S; V82S+Q154S; V82S+Y147R; V82S+Q154R; V82S+Y123H; 176Y+V82S; V82S+Y123H+Y147T; V82S+Y123H+Y147R; V82S+Y123H+Q154R; Y147R+Q154R+Y123H; Y147R+Q154R+176Y; Y147R+Q154R+T166R; Y123H+Y147R+Q154R+176Y; V82S+Y123H+Y147R+Q154R; and 176Y+V82S+Y123H+Y147R+Q154R, relative to a TadA reference sequence (e.g., TadA*7.10 (SEQ ID NO: 1)), or a corresponding mutation in another TadA.

[0642] In some embodiments, the TadA*8 is truncated. In some embodiments, the truncated TadA*8 is missing 1, 2, 3, 4, 5, 6, 7, 8, 9, 10, 11, 12, 13, 14, 15, 6, 17, 18, 19, or 20 N-terminal amino acid residues relative to the full length TadA*8. In some embodiments, the truncated TadA*8 is missing 1, 2, 3, 4, 5, 6, 7, 8, 9, 10, 11, 12, 13, 14, 15, 6, 17, 18, 19, or 20 C-terminal amino acid residues relative to the full length TadA*8. In some embodiments the adenosine deaminase variant is a full-length TadA*8.

[0643] In one embodiment, a fusion protein or complex of the present disclosure comprises a wild-type TadA is linked to an adenosine deaminase variant described herein (e.g., TadA*8), which is linked to Cas9 nickase. In particular embodiments, the fusion proteins or complexes comprise a single TadA*8 domain (e.g., provided as a monomer). In other embodiments, the base editor comprises TadA*8 and TadA(wt), which are capable of forming heterodimers.

[0644] In particular embodiments, the fusion proteins or complexes comprise a single (e.g., provided as a monomer) TadA*8. In some embodiments, the TadA*8 is linked to a Cas9 nickase. In some embodiments, the fusion proteins or complexes of the present disclosure comprise as a heterodimer of a wild-type TadA (TadA(wt)) linked to a TadA*8. In other embodiments, the fusion proteins or complexes of the present disclosure comprise as a heterodimer of a TadA*7.10 linked to a TadA*8. In some embodiments, the base editor is ABE8 comprising a TadA*8 variant monomer. In some embodiments, the base editor is ABE8 comprising a heterodimer of a TadA*8 and a TadA(wt). In some embodiments, the base editor is ABE8 comprising a heterodimer of a TadA*8 and TadA*7.10. In some embodiments, the base editor is ABE8 comprising a heterodimer of a TadA*8. In some embodiments, the TadA*8 is selected from Table 5, 11, or 12. In some embodiments, the ABE8 is selected from Table 11, 12, or 14.

[0645] In some embodiments, the adenosine deaminase is a TadA*9 variant. In some embodiments, the adenosine deaminase is a TadA*9 variant selected from the variants described below and with reference to the following sequence (termed TadA*7.10):

(SEQ ID NO: 1)
MSEVEFSHEY WMRHALTLAK RARDEREVPV GAVLVLNNRV
IGEGWNRAIG LHDPTAHAEI MALRQGGLVM QNYRLIDATL
YVTFEPCVMC AGAMIHSRIG RVVFGVRNAK TGAAGSLMDV
LHYPGMNHRV EITEGILADE CAALLCYFFR MPRQVFNAQK
KAQSSTD

[0646] In some embodiments, an adenosine deaminase comprises one or more of the following alterations: R21N, R23H, E25F, N38G, L51W, P54C, M70V, Q71M, N72K, Y73S, V82T, M94V, P124W, T133K, D139L, D139M, C146R, and A158K. The one or more alternations are shown in the sequence above in underlining and bold font.

[0647] In some embodiments, an adenosine deaminase comprises one or more of the following combinations of alterations: V82S+Q154R+Y147R; V82S+Q154R+Y123H; V82S+Q154R+Y147R+Y123H; Q154R+Y147R+Y123H+I76Y+V82S; V82S+I76Y; V82S+Y147R; V82S+Y147R+Y123H; V82S+Q154R+Y123H; Q154R+Y147R+Y123H+I76Y; V82S+Y147R; V82S+Y147R+Y123H; V82S+Q154R+Y123H; V82S+Q154R+Y147R; V82S+Q154R+Y147R; Q154R+Y147R+Y123H+I76Y; Q154R+Y147R+Y123H+I76Y+V82S; I76Y_V82S_Y123H_Y147R_Q154R; Y147R+Q154R+H123H; and V82S+Q154R.

[0648] In some embodiments, an adenosine deaminase comprises one or more of the following combinations of alterations: E25F+V82S+Y123H, T133K+Y147R+Q154R; E25F+V82S+Y123H+Y147R+Q154R; L51W+V82S+Y123H+C146R+Y147R+Q154R; Y73S+V82S+Y123H+Y147R+Q154R; P54C+V82S+Y123H+Y147R+Q154R; N38G+V82T+Y123H+Y147R+Q154R; N72K+V82S+Y123H+D139L+Y147R+Q154R; E25F+V82S+Y123H+D139M+Y147R+Q154R; Q71M+V82S+Y123H+Y147R+Q154R; E25F+V82S+Y123H+T133K+Y147R+Q154R; E25F+V82S+Y123H+Y147R+Q154R; V82S+Y123H+P124W+Y147R+Q154R; L51W+V82S+Y123H+C146R+Y147R+Q154R; P54C+V82S+Y123H+Y147R+Q154R; Y73S+V82S+Y123H+Y147R+Q154R; N38G+V82T+Y123H+Y147R+Q154R; R23H+V82S+Y123H+Y147R+Q154R; R21N+V82S+Y123H+Y147R+Q154R; V82S+Y123H+Y147R+Q154R+A158K; N72K+V82S+Y123H+D139L+Y147R+Q154R; E25F+V82S+Y123H+D139M+Y147R+Q154R; and M70V+V82S+M94V+Y123H+Y147R+Q154R In some embodiments, an adenosine deaminase comprises one or more of the following combinations of alterations: Q71M+V82S+Y123H+Y147R+Q154R; E25F+I76Y+V82S+Y123H+Y147R+Q154R; I76Y+V82T+Y123H+Y147R+Q154R; N38G+I76Y+V82S+Y123H+Y147R+Q154R; R23H+I76Y+V82S+Y123H+Y147R+Q154R; P54C+I76Y+V82S+Y123H+Y147R+Q154R; R21N+I76Y+V82S+Y123H+Y147R+Q154R; 176Y+V82S+Y123H+D139M+Y147R+Q154R; Y73S+I76Y+V82S+Y123H+Y147R+Q154R; E25F+I76Y+V82S+Y123H+Y147R+Q154R; I76Y+V82T+Y123H+Y147R+Q154R; N38G+I76Y+V82S+Y123H+Y147R+Q154R; R23H+I76Y+V82S+Y123H+Y147R+Q154R; P54C+I76Y+V82S+Y123H+Y147R+Q154R; R21N+I76Y+V82S+Y123H+Y147R+Q154R; 176Y+V82S+Y123H+D139M+Y147R+Q154R; Y73S+I76Y+V82S+Y123H+Y147R+Q154R; and V82S+Q154R; N72K_V82S+Y123H+Y147R+Q154R; Q71M_V82S+Y123H+Y147R+Q154R; V82S+Y123H+T133K+Y147R+Q154R; V82S+Y123H+T133K+Y147R+Q154R+A158K; M70V+Q71M+N72K+V82S+Y123H+Y147R+Q154R; N72K_V82S+Y123H+Y147R+Q154R; Q71M_V82S+Y123H+Y147R+Q154R; M70V+V82S+M94V+Y123H+Y147R+Q154R; V82S+Y123H+T133K+Y147R+Q154R; V82S+Y123H+T133K+Y147R+Q154R+A158K; and M70V+Q71M+N72K+V82S+Y123H+Y147R+Q154R. In some embodiments, the adenosine deaminase is expressed as a monomer. In other embodiments, the adenosine deaminase is expressed as a heterodimer. In some embodiments, the deaminase or other polypeptide sequence lacks a methionine, for example when included as a component of a fusion protein or complex. This can alter the numbering of positions. However, the skilled person will understand that such corresponding mutations refer to the same mutation, e.g., Y73S and Y72S and D139M and D138M.

[0649] In some embodiments, the TadA*9 variant comprises the alterations described in Table 15 as described herein. In some embodiments, the TadA*9 variant is a monomer. In some embodiments, the TadA*9 variant is a heterodimer with a wild-type TadA adenosine deaminase. In some embodiments, the TadA*9 variant is a heterodimer with another TadA variant (e.g., TadA*8, TadA*9). Additional details of TadA*9 adenosine deaminases are described in International PCT Application No. PCT/US2020/049975, which is incorporated herein by reference for its entirety.

[0650] Any of the mutations provided herein and any additional mutations (e.g., based on the ecTadA amino acid sequence) can be introduced into any other adenosine deaminases. Any of the mutations provided herein can be made individually or in any combination in a TadA reference sequence or another adenosine deaminase (e.g., ecTadA).

[0651] Details of A to G nucleobase editing proteins are described in International PCT Application No. PCT/US2017/045381 (WO2018/027078) and Gaudelli, N. M., et al., “Programmable base editing of A·T to G·C in genomic DNA without DNA cleavage” Nature, 551, 464-471 (2017), the entire contents of which are hereby incorporated by reference.

### C to T Editing

[0652] In some embodiments, a base editor disclosed herein comprises a fusion protein or complex comprising cytidine deaminase capable of deaminating a target cytidine (C) base of a polynucleotide to produce uridine (U), which has the base pairing properties of thymine. In some embodiments, for example where the polynucleotide is double-stranded (e.g., DNA), the uridine base can then be substituted with a thymidine base (e.g., by cellular repair machinery) to give rise to a C:G to a T:A transition. In other embodiments, deamination of a C to U in a nucleic acid by a base editor cannot be accompanied by substitution of the U to a T.

[0653] The deamination of a target C in a polynucleotide to give rise to a U is a non-limiting example of a type of base editing that can be executed by a base editor described herein. In another example, a base editor comprising a cytidine deaminase domain can mediate conversion of a cytosine (C) base to a guanine (G) base. For example, a U of a polynucleotide produced by deamination of a cytidine by a cytidine deaminase domain of a base editor can be excised from the polynucleotide by a base excision repair mechanism (e.g., by a uracil DNA glycosylase (UDG) domain), producing an abasic site. The nucleobase opposite the abasic site can then be substituted (e.g., by base repair machinery) with another base, such as a C, by for example a translesion polymerase. Although it is typical for a nucleobase opposite an abasic site to be replaced with a C, other substitutions (e.g., A, G or T) can also occur.

[0654] Accordingly, in some embodiments a base editor described herein comprises a deamination domain (e.g., cytidine deaminase domain) capable of deaminating a target C to a U in a polynucleotide. Further, as described below, the base editor can comprise additional domains which facilitate conversion of the U resulting from deamination to, in some embodiments, a T or a G. For example, a base editor comprising a cytidine deaminase domain can further comprise a uracil glycosylase inhibitor (UGI) domain to mediate substitution of a U by a T, completing a C-to-T base editing event. In another example, the base editor can comprise a uracil stabilizing protein as described herein. In another example, a base editor can incorporate a translesion polymerase to improve the efficiency of C-to-G base editing, since a translesion polymerase can facilitate incorporation of a C opposite an abasic site (i.e., resulting in incorporation of a G at the abasic site, completing the C-to-G base editing event).

[0655] A base editor comprising a cytidine deaminase as a domain can deaminate a target C in any polynucleotide, including DNA, RNA and DNA-RNA hybrids. Typically, a cytidine deaminase catalyzes a C nucleobase that is positioned in the context of a single-stranded portion of a polynucleotide. In some embodiments, the entire polynucleotide comprising a target C can be single-stranded. For example, a cytidine deaminase incorporated into the base editor can deaminate a target C in a single-stranded RNA polynucleotide. In other embodiments, a base editor comprising a cytidine deaminase domain can act on a double-stranded polynucleotide, but the target C can be positioned in a portion of the polynucleotide which at the time of the deamination reaction is in a single-stranded state. For example, in embodiments where the NAGPB domain comprises a Cas9 domain, several nucleotides can be left unpaired during formation of the Cas9-gRNA-target DNA complex, resulting in formation of a Cas9 “R-loop complex”. These unpaired nucleotides can form a bubble of single-stranded DNA that can serve as a substrate for a single-strand specific nucleotide deaminase enzyme (e.g., cytidine deaminase).

[0656] In some embodiments, a cytidine deaminase of a base editor comprises all or a portion (e.g., a functional portion) of an apolipoprotein B mRNA editing complex (APOBEC) family deaminase. APOBEC is a family of evolutionarily conserved cytidine deaminases. Members of this family are C-to-U editing enzymes. The N-terminal domain of APOBEC like proteins is the catalytic domain, while the C-terminal domain is a pseudocatalytic domain. More specifically, the catalytic domain is a zinc dependent cytidine deaminase domain and is important for cytidine deamination. APOBEC family members include APOBEC1, APOBEC2, APOBEC3A, APOBEC3B, APOBEC3C, APOBEC3D (“APOBEC3E” now refers to this), APOBEC3F, APOBEC3G, APOBEC3H, APOBEC4, and Activation-induced (cytidine) deaminase. In some embodiments, a deaminase incorporated into a base editor comprises all or a portion (e.g., a functional portion) of an APOBEC1 deaminase. In some embodiments, a deaminase incorporated into a base editor comprises all or a portion (e.g., a functional portion) of APOBEC2 deaminase. In some embodiments, a deaminase incorporated into a base editor comprises all or a portion (e.g., a functional portion) of is an APOBEC3 deaminase. In some embodiments, a deaminase incorporated into a base editor comprises all or a portion (e.g., a functional portion) of an APOBEC3A deaminase. In some embodiments, a deaminase incorporated into a base editor comprises all or a portion (e.g., a functional portion) of APOBEC3B deaminase. In some embodiments, a deaminase incorporated into a base editor comprises all or a portion (e.g., a functional portion) of APOBEC3C deaminase. In some embodiments, a deaminase incorporated into a base editor comprises all or a portion (e.g., a functional portion) of APOBEC3D deaminase. In some embodiments, a deaminase incorporated into a base editor comprises all or a portion (e.g., a functional portion) of APOBEC3E deaminase. In some embodiments, a deaminase incorporated into a base editor comprises all or a portion (e.g., a functional portion) of APOBEC3F deaminase. In some embodiments, a deaminase incorporated into a base editor comprises all or a portion (e.g., a functional portion) of APOBEC3G deaminase. In some embodiments, a deaminase incorporated into a base editor comprises all or a portion (e.g., a functional portion) of APOBEC3H deaminase. In some embodiments, a deaminase incorporated into a base editor comprises all or a portion (e.g., a functional portion) of APOBEC4 deaminase. In some embodiments, a deaminase incorporated into a base editor comprises all or a portion (e.g., a functional portion) of activation-induced deaminase (AID). In some embodiments a deaminase incorporated into a base editor comprises all or a portion (e.g., a functional portion) of cytidine deaminase 1 (CDA1). It should be appreciated that a base editor can comprise a deaminase from any suitable organism (e.g., a human or a rat). In some embodiments, a deaminase domain of a base editor is from a human, chimpanzee, gorilla, monkey, cow, dog, rat, or mouse. In some embodiments, the deaminase domain of the base editor is derived from rat (e.g., rat APOBEC1). In some embodiments, the deaminase domain of the base editor is human APOBEC1. In some embodiments, the deaminase domain of the base editor is pmCDA1.

[0657] Other exemplary deaminases that can be fused to Cas9 according to aspects of this disclosure are provided below. In embodiments, the deaminases are activation-induced deaminases (AID). It should be understood that, in some embodiments, the active domain of the respective sequence can be used, e.g., the domain without a localizing signal (nuclear localization sequence, without nuclear export signal, cytoplasmic localizing signal).

[0658] Some aspects of the present disclosure are based on the recognition that modulating the deaminase domain catalytic activity of any of the fusion proteins or complexes described herein, for example by making point mutations in the deaminase domain, affect the processivity of the fusion proteins or complexes (e.g., base editors). For example, mutations that reduce, but do not eliminate, the catalytic activity of a deaminase domain within a base editing fusion protein or complex can make it less likely that the deaminase domain will catalyze the deamination of a residue adjacent to a target residue, thereby narrowing the deamination window. The ability to narrow the deamination window can prevent unwanted deamination of residues adjacent to specific target residues, which can decrease or prevent off-target effects.

[0659] For example, in some embodiments, an APOBEC deaminase incorporated into a base editor comprises one or more mutations selected from the group consisting of H121X, H122X, R126X, R126X, RI 18X, W90X, W90X, and R132X of rAPOBEC1, or one or more corresponding mutations in another APOBEC deaminase, wherein X is any amino acid. In some embodiments, an APOBEC deaminase incorporated into a base editor comprises one or more mutations selected from the group consisting of H121R, H122R, R126A, R126E, RI 18A, W90A, W90Y, and R132E of rAPOBEC1, or one or more corresponding mutations in another APOBEC deaminase.

[0660] In some embodiments, an APOBEC deaminase incorporated into a base editor comprises one or more mutations selected from the group consisting of D316X, D317X, R320X, R320X, R313X, W285X, W285X, R326X of hAPOBEC3G, or one or more corresponding mutations in another APOBEC deaminase, wherein X is any amino acid. In some embodiments, any of the fusion proteins or complexes provided herein comprise an APOBEC deaminase comprising one or more mutations selected from the group consisting of D316R, D317R, R320A, R320E, R313A, W285A, W285Y, R326E of hAPOBEC3G, or one or more corresponding mutations in another APOBEC deaminase.

[0661] In some embodiments, an APOBEC deaminase incorporated into a base editor comprises a H121R and a H122R mutation of rAPOBEC1, or one or more corresponding mutations in another APOBEC deaminase. In some embodiments an APOBEC deaminase incorporated into a base editor comprises an APOBEC deaminase comprising a R126A mutation of rAPOBEC1, or one or more corresponding mutations in another APOBEC deaminase. In some embodiments, an APOBEC deaminase incorporated into a base editor comprises an APOBEC deaminase comprising a R126E mutation of rAPOBEC1, or one or more corresponding mutations in another APOBEC deaminase. In some embodiments, an APOBEC deaminase incorporated into a base editor comprises an APOBEC deaminase comprising a R118A mutation of rAPOBEC1, or one or more corresponding mutations in another APOBEC deaminase. In some embodiments, an APOBEC deaminase incorporated into a base editor comprises an APOBEC deaminase comprising a W90A mutation of rAPOBEC1, or one or more corresponding mutations in another APOBEC deaminase. In some embodiments, an APOBEC deaminase incorporated into a base editor comprises an APOBEC deaminase comprising a W90Y mutation of rAPOBEC1, or one or more corresponding mutations in another APOBEC deaminase. In some embodiments, an APOBEC deaminase incorporated into a base editor comprises an APOBEC deaminase comprising a R132E mutation of rAPOBEC1, or one or more corresponding mutations in another APOBEC deaminase. In some embodiments an APOBEC deaminase incorporated into a base editor comprises an APOBEC deaminase comprising a W90Y and a R126E mutation of rAPOBEC1, or one or more corresponding mutations in another APOBEC deaminase. In some embodiments, an APOBEC deaminase incorporated into a base editor comprises an APOBEC deaminase comprising a R126E and a R132E mutation of rAPOBEC1, or one or more corresponding mutations in another APOBEC deaminase. In some embodiments, an APOBEC deaminase incorporated into a base editor comprises an APOBEC deaminase comprising a W90Y and a R132E mutation of rAPOBEC1, or one or more corresponding mutations in another APOBEC deaminase. In some embodiments, an APOBEC deaminase incorporated into a base editor comprises an APOBEC deaminase comprising a W90Y, R126E, and R132E mutation of rAPOBEC1, or one or more corresponding mutations in another APOBEC deaminase.

[0662] In some embodiments, an APOBEC deaminase incorporated into a base editor comprises an APOBEC deaminase comprising a D316R and a D317R mutation of hAPOBEC3G, or one or more corresponding mutations in another APOBEC deaminase. In some embodiments, any of the fusion proteins or complexes provided herein comprise an APOBEC deaminase comprising a R320A mutation of hAPOBEC3G, or one or more corresponding mutations in another APOBEC deaminase. In some embodiments, an APOBEC deaminase incorporated into a base editor comprises an APOBEC deaminase comprising a R320E mutation of hAPOBEC3G, or one or more corresponding mutations in another APOBEC deaminase. In some embodiments, an APOBEC deaminase incorporated into a base editor comprises an APOBEC deaminase comprising a R313A mutation of hAPOBEC3G, or one or more corresponding mutations in another APOBEC deaminase. In some embodiments, an APOBEC deaminase incorporated into a base editor comprises an APOBEC deaminase comprising a W285A mutation of hAPOBEC3G, or one or more corresponding mutations in another APOBEC deaminase. In some embodiments, an APOBEC deaminase incorporated into a base editor comprises an APOBEC deaminase comprising a W285Y mutation of hAPOBEC3G, or one or more corresponding mutations in another APOBEC deaminase. In some embodiments, an APOBEC deaminase incorporated into a base editor comprises an APOBEC deaminase comprising a R326E mutation of hAPOBEC3G, or one or more corresponding mutations in another APOBEC deaminase. In some embodiments, an APOBEC deaminase incorporated into a base editor comprises an APOBEC deaminase comprising a W285Y and a R320E mutation of hAPOBEC3G, or one or more corresponding mutations in another APOBEC deaminase. In some embodiments, an APOBEC deaminase incorporated into a base editor comprises an APOBEC deaminase comprising a R320E and a R326E mutation of hAPOBEC3G, or one or more corresponding mutations in another APOBEC deaminase. In some embodiments, an APOBEC deaminase incorporated into a base editor comprises an APOBEC deaminase comprising a W285Y and a R326E mutation of hAPOBEC3G, or one or more corresponding mutations in another APOBEC deaminase. In some embodiments, an APOBEC deaminase incorporated into a base editor comprises an APOBEC deaminase comprising a W285Y, R320E, and R326E mutation of hAPOBEC3G, or one or more corresponding mutations in another APOBEC deaminase.

[0663] A number of modified cytidine deaminases are commercially available, including, but not limited to, SaBE3, SaKKH-BE3, VQR-BE3, EQR-BE3, VRER-BE3, YE1-BE3, EE-BE3, YE2-BE3, and YEE-BE3, which are available from Addgene (plasmids 85169, 85170, 85171, 85172, 85173, 85174, 85175, 85176, 85177). In some embodiments, a deaminase incorporated into a base editor comprises all or a portion (e.g., a functional portion) of an APOBEC1 deaminase.

[0664] In some embodiments, the fusion proteins or complexes of the present disclosure comprise one or more cytidine deaminase domains. In some embodiments, the cytidine deaminases provided herein are capable of deaminating cytosine or 5-methylcytosine to uracil or thymine. In some embodiments, the cytidine deaminases provided herein are capable of deaminating cytosine in DNA. The cytidine deaminase may be derived from any suitable organism. In some embodiments, the cytidine deaminase is a naturally-occurring cytidine deaminase that includes one or more mutations corresponding to any of the mutations provided herein. One of skill in the art will be able to identify the corresponding residue in any homologous protein, e.g., by sequence alignment and determination of homologous residues. Accordingly, one of skill in the art would be able to generate mutations in any naturally-occurring cytidine deaminase that corresponds to any of the mutations described herein. In some embodiments, the cytidine deaminase is from a prokaryote. In some embodiments, the cytidine deaminase is from a bacterium. In some embodiments, the cytidine deaminase is from a mammal (e.g., human).

[0665] In some embodiments, the cytidine deaminase comprises an amino acid sequence that is at least 60%, at least 65%, at least 70%, at least 75%, at least 80%, at least 85%, at least 90%, at least 95%, at least 96%, at least 97%, at least 98%, at least 99%, or at least 99.5% identical to any one of the cytidine deaminase amino acid sequences set forth herein. It should be appreciated that cytidine deaminases provided herein may include one or more mutations (e.g., any of the mutations provided herein). Some embodiments provide a polynucleotide molecule encoding the cytidine deaminase nucleobase editor polypeptide of any previous aspect or as delineated herein. In some embodiments, the polynucleotide is codon optimized.

[0666] The disclosure provides any deaminase domains with a certain percent identity plus any of the mutations or combinations thereof described herein. In some embodiments, the cytidine deaminase comprises an amino acid sequence that has 1, 2, 3, 4, 5, 6, 7, 8, 9, 10, 11, 12, 13, 14, 15, 16, 17, 18, 19, 20, 21, 22, 21, 24, 25, 26, 27, 28, 29, 30, 31, 32, 33, 34, 35, 36, 37, 38, 39, 40, 41, 42, 43, 44, 45, 46, 47, 48, 49, 50, or more mutations compared to a reference sequence, or any of the cytidine deaminases provided herein. In some embodiments, the cytidine deaminase comprises an amino acid sequence that has at least 5, at least 10, at least 15, at least 20, at least 25, at least 30, at least 35, at least 40, at least 45, at least 50, at least 60, at least 70, at least 80, at least 90, at least 100, at least 110, at least 120, at least 130, at least 140, at least 150, at least 160, or at least 170 identical contiguous amino acid residues as compared to any one of the amino acid sequences known in the art or described herein.

[0667] In embodiments, a fusion protein of the invention comprises two or more nucleic acid editing domains.

[0668] Details of C to T nucleobase editing proteins are described in International PCT Application No. PCT/US2016/058344 (WO2017/070632) and Komor, A. C., et al., “Programmable editing of a target base in genomic DNA without double-stranded DNA cleavage” Nature 533, 420-424 (2016), the entire contents of which are hereby incorporated by reference.

### Cytidine Adenosine Base Editors (CABEs)

[0669] In some embodiments, a base editor described herein comprises an adenosine deaminase variant that has increased cytidine deaminase activity. Such base editors may be referred to as “cytidine adenosine base editors (CABEs).” In some instances, an adenosine deaminase variant has both adenine and cytosine deaminase activity (i.e., is a dual deaminase). In some embodiments, the adenosine deaminase variants deaminate adenine and cytosine in DNA. In some embodiments, the adenosine deaminase variants deaminate adenine and cytosine in single-stranded DNA. In some embodiments, the adenosine deaminase variants deaminate adenine and cytosine in RNA. In some embodiments, the adenosine deaminase variant predominantly deaminates cytosine in DNA and/or RNA (e.g., greater than 30%, 40%, 50%, 60%, 70%, 80%, 90%, 95%, or 99% of all deaminations catalyzed by the adenosine deaminase variant, or the number of cytosine deaminations catalyzed by the variant is about or at least about 2-fold, 3-fold, 4-fold, 5-fold, 6-fold, 7-fold, 8-fold, 9-fold, 10-fold, 25-fold, 50-fold, 75-fold, 100-fold, 500-fold, or 1,000-fold greater than the number adenine deaminations catalyzed by the variant). In some embodiments, the adenosine deaminase variant has approximately equal cytosine and adenosine deaminase activity (e.g., the two activities are within about 10% or 20% of each other). In some embodiments, the adenosine deaminase variant has predominantly cytosine deaminase activity, and little, if any, adenosine deaminase activity. In some embodiments, the adenosine deaminase variant has cytosine deaminase activity, and no significant or no detectable adenosine deaminase activity. In some embodiments, the target polynucleotide is present in a cell in vitro or in vivo. In some embodiments, the cell is a bacteria, yeast, fungi, insect, plant, or mammalian cell.

[0670] In some embodiments, the CABE comprises a bacterial TadA deaminase variant (e.g., ecTadA). In some embodiments, the CABE comprises a truncated TadA deaminase variant. In some embodiments, the CABE comprises a fragment of a TadA deaminase variant. In some embodiments, the CABE comprises a TadA*8.20 variant.

[0671] In some embodiments, the adenosine deaminase variants of the invention comprise one or more alterations. In some embodiments, an adenosine deaminase variant of the invention is a TadA adenosine deaminase comprising one or more alterations that increase cytosine deaminase activity (e.g., at least about 10-fold, 20-fold, 30-fold, 40-fold, 50-fold, 60-fold, 70-fold or more increase) while maintaining adenosine deaminase activity (e.g., at least about 30%, 40%, 50% or more of the activity of a reference adenosine deaminase (e.g., TadA*8.20 or TadA*8.19)). In some embodiments, the adenosine deaminase variant is a bacterial TadA deaminase variant (e.g., ecTadA). In some embodiments, the adenosine deaminase variant is a truncated TadA deaminase variant. In some embodiments, the adenosine deaminase variant is a fragment of a TadA deaminase variant. In some embodiments, an adenosine deaminase variant is a TadA*8 variant comprising one or more alterations that increase cytosine deaminase activity (e.g., at least about 10-fold, 20-fold, 30-fold, 40-fold, 50-fold, 60-fold, 70-fold or more increase) while maintaining adenosine deaminase activity of at least about 30%, 40%, 50% or more of the adenosine deaminase activity of a reference adenosine deaminase (e.g., TadA*8.20 or TadA*8.19). In some embodiments, an adenosine deaminase variant is a TadA*8.20 adenosine deaminase comprising one or more alterations that increase cytosine deaminase activity (e.g., at least about 10-fold, 20-fold, 30-fold, 40-fold, 50-fold, 60-fold, 70-fold or more increase) while maintaining adenosine deaminase activity of at least 30%, 40%, 50% of the activity of a reference adenosine deaminase (e.g., TadA*8.20 or TadA*8.19). In some embodiments, an adenosine deaminase variant as provided herein has an increased cytosine deaminase activity of at least about 10-fold, 20-fold, 30-fold, 40-fold, 50-fold, 60-fold, 70-fold, 80-fold, 90-fold, 100-fold or more relative to a reference adenosine deaminase (e.g., TadA*8.20 or TadA*8.19). In some embodiments, an adenosine deaminase variant as provided herein maintains a level of adenosine deaminase activity that is at least about 30%, 40%, 50%, 60%, 70% of the activity of a reference adenosine deaminase (e.g., TadA*8.20 or TadA*8.19). In some embodiments, the reference adenosine deaminase is TadA*8.20 or TadA*8.19.

[0672] In some embodiments, the adenosine deaminase variant is an adenosine deaminase comprising one or more alterations that increase cytosine deaminase activity and has an amino acid sequence that is at least about 70%, 75%, 80%, 85%, 90%, 95%, 98%, 99% or greater identity to SEQ ID NO: 1 below:

(SEQ ID NO: 1)
MSEVEFSHEYWMRHALTLAKRARDEREVPVGAVLVLNNRVIGEGWNRAI
GLHDPTAHAEIMALRQGGLVMQNYRLIDATLYVTFEPCVMCAGAMIHSR
IGRVVFGVRNAKTGAAGSLMDVLHYPGMNHRVEITEGILADECAALLCY
FFRMPRQVFNAQKKAQSSTD

[0673] In some embodiments, the adenosine deaminase variant is an adenosine deaminase comprising the amino acid sequence of SEQ ID NO: 1 and one or more alterations that increase cytosine deaminase activity. In various embodiments, the one or more alterations of the invention do not include a R amino acid at position 48 of SEQ ID NO: 1, or a corresponding mutation in another adenosine deaminase.

[0674] In some embodiments, the adenosine deaminase variant is an adenosine deaminase comprising one or more alterations at an amino acid position selected from 2, 4, 6, 13, 27, 29, 100, 112, 114, 115, 162, and 165 of an amino acid sequence having at least about 70%, 75%, 80%, 85%, 90%, 95%, 98%, 99% or greater identity to SEQ ID NO: 1, or a corresponding alteration in another deaminase. In some embodiments, the adenosine deaminase variant is an adenosine deaminase comprising two or more alterations at an amino acid position selected from the group consisting of 2, 4, 6, 8, 13, 17, 23, 27, 29, 30, 47, 48, 49, 67, 76, 77, 82, 84, 96, 100, 107, 112, 114, 115, 118, 119, 122, 127, 142, 143, 147, 149, 158, 159, 162 165, 166, and 167, of an amino acid sequence having at least about 70%, 75%, 80%, 85%, 90%, 95%, 98%, 99% or greater identity to SEQ ID NO: 1, or a corresponding alteration in another deaminase. In some embodiments, the two or more alterations are at an amino acid position selected from the group consisting of S2X, V4X, F6X, H8X, R13X, T17X, R23X, E27X, P29X, V30X, R47X, A48X, I49X, G67X, Y76X, D77X, S82X, F84X, H96X, G100X, R107X, G112X, A114X, G115X, M118X, D119X, H122X, N127X, A142X, A143X, R147X, Y147X, F149X, A158X, Q159X, A162X, S165X, T166X, and D167X of an amino acid sequence having at least about 70%, 75%, 80%, 85%, 90%, 95%, 98%, 99% or greater identity to SEQ ID NO: 1, or a corresponding alteration in another deaminase. In various embodiments, the alterations of the invention do not include a 48R mutation. In some embodiments, the adenosine deaminase variant is an adenosine deaminase comprising one or more alterations at an amino acid position selected from 2, 4, 6, 13, 27, 29, 100, 112, 114, 115, 162, and 165 of an amino acid sequence having at least about 70%, 75%, 80%, 85%, 90%, 95%, 98%, 99% or greater identity to SEQ ID NO: 1, or a corresponding alteration in another deaminase.

[0675] In some embodiments, the adenosine deaminase variant is an adenosine deaminase comprising one or more alterations selected from the group consisting of S2H, V4K, V4S, V4T, V4Y, F6G, F6H, F6Y, H8Q, R13G, T17A, T17W, R23Q, E27C, E27G, E27H, E27K, E27Q, E27S, E27G, P29A, P29G, P29K, V30F, V30I, R47G, R47S, A48G, I49K, I49M, I49N, I49Q, I49T, G67W, I76H, I76R, I76W, Y76H, Y76R, Y76W, F84A, F84M, H96N, G100A, G100K, T111H, G112H, A114C, G115M, M118L, H122G, H122R, H122T, N1271, N127K, N127P, A142E, R147H, A158V, Q159S, A162C, A162N, A162Q, and S165P of an amino acid sequence having at least about 70%, 75%, 80%, 85%, 90%, 95%, 98%, 99% or greater identity to SEQ ID NO: 1, or a corresponding alteration in another deaminase.

[0676] In some embodiments, the adenosine deaminase variant is an adenosine deaminase comprising a combination of amino acid alterations selected from: E27H, Y76I, and F84M; E27H, I49K, and Y76I; E27S, I49K, Y76I, and A162N; E27K and D119N; E27H and Y76I; E27S, I49K, and G67W; E27S, 149K, and Y761; 149T, G67W, and H96N; E27C, Y76I, and D119N; R13G, E27Q, and N127K; T17A, E27H, 149M, Y761, and M118L; I49Q, Y76I, and G115M; S2H, I49K, Y76I, and G112H; R47S and R107C; H8Q, I49Q, and Y76I; T17A, A48G, S82T, and A142E; E27G and I49N; E27G, D77G, and S165P; E27S, I49K, and S82T; E27S, I49K, S82T, and Gi 15M; E27S, V301, 149K, and S82T; E27S, V30F, I49K, S82T, F84A, R107C, and A142E; E27S, V30F, I49K, S82T, F84A, G112H, and A142E; E27S, V30F, I49K, S82T, F84A, Gi 15M, and A142E; E27S, I49K, S82T, F84L, and R107C; E27S, I49K, S82T, F84L, and G112H; E27S, I49K, S82T, F84L, and G115M; E27S, I49K, S82T, F84L, R107C, and Gi 12H; E27S, I49K, S82T, F84L, R107C, and Gi 15M; E27S, I49K, S82T, F84L, R107C, and A142E; E27S, I49K, S82T, F84L, Gi 12H, and A142E; E27S, I49K, S82T, F84L, G115M, and A142E; E27S, I49K, S82T, F84L, R107C, G112H, G115M, and A142E; E27S, V301, 149K, S82T, and F84L; E27S, P29G, I49K, and S82T; E27S, P29G, I49K, S82T, and G115M; E27S, P29G, I49K, S82T, and A142E; P29G, I49K, and S82T; E27G, I49K, and S82T; E27G, I49K, S82T, R107C, and A142E; V4K, E27H, I49K, Y76I, and A114C; V4K, E27H, I49K, Y76I, and D77G; F6Y, E27H, I49K, Y76I, G100A, and H122R; V4T, E27H, I49K, Y76R, and H122G; F6Y, E27H, I49K, and Y76W; F6Y, E27H, I49K, Y76I, and D119N; F6Y, E27H, I49K, Y76I, and A114C; F6Y, E27H, I49K, and Y76I; V4K, E27H, 149K, Y76W, and H122T; F6G, E27H, I49K, Y76R, and G100K; F6H, E27H, I49K, Y76I, and H122N; E27H, I49K, Y76I, and A114C; F6Y, E27H, I49K, Y76H, H122R, and T1661; E27H, 149K, Y761, and N127P; R23Q, E27H, I49K, and Y76R; E27H, I49K, Y76H, H122R, and A158V; F6Y, E27H, I49K, Y76I, and T111H; E27H, I49K, Y76I, and R147H; E27H, 149K, Y761, and A143E; F6Y, E27H, I49K, and Y76R; T17W, E27H, I49K, Y76H, H122G, and A158V; V4S, E27H, I49K, A143E, and Q159S; E27H, I49K, Y76I, N127I, and A162Q; T17A, E27H, and A48G; T17A, E27K, and A48G; T17A, E27S, and A48G; T17A, E27S, A48G, and I49K; T17A, E27G, and A48G; T17A, A48G, and I49N; T17A, E27G, A48G, and I49N; T17A, E27Q, and A48G; E27S, I49K, S82T, and R107C; E27S, I49K, S82T, and Gi 12H; E27S, I49K, S82T, and A142E; E27S, I49K, S82T, R107C, and G112H; E27S, I49K, S82T, R107C, and G115M; E27S, 149K, S82T, R107C, and A142E; E27S, I49K, S82T, G112H, and A142E; E27S, 149K, S82T, G115M, and A142E; E27S, I49K, S82T, R107C, G112H, G115M, and A142E; E27S, V301, 149K, S82T, and R107C; E27S, V301, 149K, S82T, and G112H; E27S, V301, 149K, S82T, and G115M; E27S, V301, 149K, S82T, and A142E; E27S, V301, 149K, S82T, R107C, and G112H; E27S, V301, I49K, S82T, R107C, and Gi 15M; E27S, V301, 149K, S82T, R107C, and A142E; E27S, V301, I49K, S82T, G112H, and A142E; E27S, V301, 149K, S82T, G115M, and A142E; E27S, V30I, I49K, S82T, R107C, Gi 12H, Gi 15M, and A142E; E27S, V30L, I49K, and S82T; E27S, V30L, I49K, S82T, and R107C; E27S, V30L, I49K, S82T, and Gi 12H; E27S, V30L, 149K, S82T, and G115M; E27S, V30L, I49K, S82T, and A142E; E27S, V30L, I49K, S82T, R107C, and G112H; E27S, V30L, I49K, S82T, R107C, and Gi 15M; E27S, V30L, I49K, S82T, R107C, and A142E; E27S, V30L, I49K, S82T, Gi 12H, and A142E; E27S, V30L, I49K, S82T, Gi 15M, and A142E; E27S, V30L, I49K, S82T, R107C, Gi 12H, Gi 15M, and A142E; E27S, V30F, 149K, S82T, and F84A; E27S, V30F, I49K, S82T, F84A, and R107C; E27S, V30F, I49K, S82T, F84A, and G112H; E27S, V30F, I49K, S82T, F84A, and G115M; E27S, V30F, I49K, S82T, F84A, and A142E; E27S, V30F, I49K, S82T, F84A, R107C, and G112H; E27S, V30F, I49K, S82T, F84A, R107C, and G115M; E27S, V30F, I49K, S82T, F84A, R107C, G112H, G115M, and A142E; E27S, I49K, S82T, and F84L; E27S, I49K, S82T, F84L, and A142E; E27S, V301, 149K, S82T, F84L, and R107C; E27S, V301, 149K, S82T, F84L, and G112H; E27S, V301, 149K, S82T, F84L, and Gi 15M; E27S, V301, 149K, S82T, F84L, and A142E; E27S, V301, 149K, S82T, F84L, R107C, and G112H; E27S, V301, 149K, S82T, F84L, R107C, and G115M; E27S, V301, 149K, S82T, F84L, R107C, and A142E; E27S, V301, 149K, S82T, F84L, Gi 12H, and A142E; E27S, V301, 149K, S82T, F84L, Gi 15M, and A142E; E27S, V301, 149K, S82T, F84L, R107C, Gi 12H, G115M, and A142E; E27S, P29G, I49K, S82T, and R107C; E27S, P29G, 149K, S82T, and G112H; E27S, P29G, I49K, S82T, R107C, and G112H; E27S, P29G, I49K, S82T, R107C, and G115M; E27S, P29G, I49K, S82T, R107C, and A142E; E27S, P29G, 149K, S82T, G112H, and A142E; E27S, P29G, I49K, S82T, G115M, and A142E; E27S, P29G, I49K, S82T, R107C, G112H, G115M, and A142E; P29G, I49K, S82T, and R107C; P29G, 149K, S82T, and G112H; P29G, I49K, S82T, and G115M; P29G, I49K, S82T, and A142E; P29G, I49K, S82T, R107C, and G112H; P29G, I49K, S82T, R107C, and G115M; P29G, I49K, S82T, R107C, and A142E; P29G, I49K, S82T, G112H, and A142E; P29G, I49K, S82T, G115M, and A142E; P29G, I49K, S82T, R107C, G112H, G115M, and A142E; P29K, I49K, and S82T; P29K, 149K, S82T, and R107C; P29K, I49K, S82T, and G112H; P29K, I49K, S82T, and G115M; P29K, I49K, S82T, and A142E; P29K, I49K, S82T, R107C, and G112H; P29K, I49K, S82T, R107C, and G115M; P29K, I49K, S82T, R107C, and A142E; P29K, I49K, S82T, Gi 12H, and A142E; P29K, I49K, S82T, Gi 15M, and A142E; P29K, I49K, S82T, R107C, Gi 12H, Gi 15M, and A142E; P29K, V301, 149K, and S82T; P29K, V301, 149K, S82T, and R107C; P29K, V301, 149K, S82T, and G112H; P29K, V301, 149K, S82T, and Gi 15M; P29K, V301, 149K, S82T, and A142E; P29K, V301, 149K, S82T, R107C, and G112H; P29K, V301, 149K, S82T, R107C, and G115M; P29K, V301, 149K, S82T, R107C, and A142E; P29K, V301, 149K, S82T, Gi 12H, and A142E; P29K, V301, 149K, S82T, G115M, and A142E; P29K, V301, 149K, S82T, R107C, G112H, G115M, and A142E; P29K, I49K, S82T, and F84L; P29K, I49K, S82T, F84L, and R107C; P29K, I49K, S82T, F84L, and G112H; P29K, I49K, S82T, F84L, and G115M; P29K, I49K, S82T, F84L, and A142E; P29K, I49K, S82T, F84L, R107C, and G112H; P29K, I49K, S82T, F84L, R107C, and G115M; P29K, I49K, S82T, F84L, R107C, and A142E; P29K, I49K, S82T, F84L, G112H, and A142E; P29K, I49K, S82T, F84L, G115M, and A142E; P29K, I49K, S82T, F84L, R107C, G112H, G115M, and A142E; P29K, V301, 149K, S82T, and F84L; P29K, V301, 149K, S82T, F84L, and R107C; P29K, V301, 149K, S82T, F84L, and Gi 12H; P29K, V301, 149K, S82T, F84L, and G115M; P29K, V301, 149K, S82T, F84L, and A142E; P29K, V301, 149K, S82T, F84L, R107C, and G112H; P29K, V301, 149K, S82T, F84L, R107C, and G115M; P29K, V301, I49K, S82T, F84L, R107C, and A142E; P29K, V301, 149K, S82T, F84L, G112H, and A142E; P29K, V301, 149K, S82T, F84L, G115M, and A142E; P29K, V301, 149K, S82T, F84L, R107C, G112H, G115M, and A142E; E27G, I49K, S82T, and R107C; E27G, 149K, S82T, and G112H; E27G, I49K, S82T, and Gi 15M; E27G, I49K, S82T, and A142E; E27G, I49K, S82T, R107C, and Gi 12H; E27G, I49K, S82T, R107C, and Gi 15M; E27G, I49K, S82T, Gi 12H, and A142E; E27G, I49K, S82T, G115M, and A142E; E27G, I49K, S82T, R107C, G112H, G115M, and A142E; E27H, I49K, and S82T; E27H, I49K, S82T, and R107C; E27H, 149K, S82T, and G112H; E27H, I49K, S82T, and G115M; E27H, I49K, S82T, and A142E; E27H, I49K, S82T, R107C, and G112H; E27H, I49K, S82T, R107C, and G115M; E27H, I49K, S82T, R107C, and A142E; E27H, I49K, S82T, G112H, and A142E; E27H, I49K, S82T, G115M, and A142E; E27H, I49K, S82T, R107C, G112H, G115M, and A142E; E27S, and S82T; E27S, S82T, and R107C; E27S, S82T, and Gi 12H; E27S, S82T, and Gi 15M; E27S, S82T, and A142E; E27S, S82T, R107C, and G112H; E27S, S82T, R107C, and G115M; E27S, S82T, R107C, and A142E; E27S, S82T, G112H, and A142E; E27S, S82T, G115M, and A142E; E27S, S82T, R107C, G112H, G115M, and A142E; P29A, and S82T; P29A, S82T, and R107C; P29A, S82T, and G112H; P29A, S82T, and G115M; P29A, S82T, and A142E; P29A, S82T, R107C, and G112H; P29A, S82T, R107C, and G115M; P29A, S82T, R107C, and A142E; P29A, S82T, G112H, and A142E; P29A, S82T, G115M, and A142E; P29A, S82T, R107C, G112H, G115M, and A142E; E27S, V30I, and S82T; E27S, V30I, S82T, and R107C; E27S, V30I, S82T, and G112H; E27S, V30I, S82T, and Gi 15M; E27S, V30I, S82T, and A142E; E27S, V301, S82T, R107C, and G112H; E27S, V30I, S82T, R107C, and G115M; E27S, V30I, S82T, R107C, and A142E; E27S, V30I, S82T, Gi 12H, and A142E; E27S, V30I, S82T, Gi 15M, and A142E; E27S, V30I, S82T, R107C, G112H, G115M, and A142E; P29A, V30I, S82T, and F84L; P29A, V30I, S82T, F84L, and R107C; P29A, V30I, S82T, F84L, and Gi 12H; P29A, V30I, S82T, F84L, and Gi 15M; P29A, V30I, S82T, F84L, and A142E; P29A, V30I, S82T, F84L, R107C, and Gi 12H; P29A, V30I, S82T, F84L, R107C, and Gi 15M; P29A, V30I, S82T, F84L, R107C, and A142E; P29A, V30I, S82T, F84L, G112H, and A142E; P29A, V30I, S82T, F84L, G115M, and A142E; P29A, V30I, S82T, F84L, R107C, G112H, G115M, and A142E; E27S, P29A, V30L, I49K, S82T, F84L, R107C, G112H, G115M, and A142E; V4K, and A114C; V4K, and D77G; F6Y, G100A, and H122R; V4T, I76R, and H122G; F6Y, and I76W; F6Y, and D119N; F6Y, and A114C; V4K, I76W, and H122T; F6G, I76R, and G100K; F6H, and H122N; F6Y, 176H, H122R, and T1661; R23Q, and I76R; I76H, H122R, and A158V; F6Y, and T111H; T111H, H122G, and A162C; F6Y, and I76R; T17W, I76H, H122G, and A158V; V4S, I76Y, A143E, and Q159S; N127I, A162Q; E27H, Y76I, F84M, and F149Y; E27H, I49K, Y76I, and F149Y; T17A, E27H, 149M, Y76I, M118L, and F149Y; T17A, A48G, S82T, A142E, and F149Y; E27G, and F149Y; E27G, I49N, and F149Y; E27H, Y76I, F84M, Y147D, F149Y, T166I, and D167N; E27H, I49K, Y76I, Y147D, F149Y, T166I, D167N; T17A, E27H, I49M, Y76I, M118L, Y147D, F149Y, T1661, and D167N; T17A, A48G, S82T, A142E, Y147D, F149Y, T166I, and D167N; E27G, Y147D, F149Y, T166I, and D167N; E27G, I49N, Y147D, F149Y, T166I, and D167N; F6Y, E27H, I49K, Y76W, S82T, R107C, G112H, G115M, and A142E; F6Y, E27H, I49K, D77G, S82T, R107C, G112H, G115M, and A142E; F6Y, E27H, I49K, S82T, R107C, G112H, A114C, G115M, and A142E; F6Y, E27H, I49K, S82T, R107C, G112H, G115M, D119N, and A142E; F6Y, E27H, I49K, S82T, R107C, G112H, G115M, H122G, and A142E; F6Y, E27H, I49K, S82T, R107C, G112H, G115M, N127P, and A142E; F6Y, E27H, I49K, S82T, R107C, G112H, G115M, A142E, and A143E; F6Y, E27H, I49K, S82T, R107C, G112H, G115M, and A143E; F6Y, E27H, I49K, Y76W, D77G, S82T, R107C, G112H, G115M, and A142E; F6Y, E27H, I49K, Y76W, S82T, R107C, G112H, A114C, G115M, and A142E; F6Y, E27H, I49K, Y76W, S82T, R107C, G112H, G115M, D119N, and A142E; F6Y, E27H, I49K, Y76W, S82T, R107C, G112H, G115M, H122G, and A142E; F6Y, E27H, I49K, Y76W, S82T, R107C, G112H, G115M, N127P, and A142E; F6Y, E27H, I49K, Y76W, S82T, R107C, G112H, G115M, A142E, and A143E; F6Y, E27H, I49K, Y76W, S82T, R107C, Gi 12H, Gi 15M, and A143E; F6Y, E27H, I49K, D77G, S82T, R107C, G112H, A114C, G115M, and A142E; F6Y, E27H, I49K, D77G, S82T, R107C, G112H, G115M, D119N, and A142E; F6Y, E27H, I49K, D77G, S82T, R107C, G112H, G115M, H122G, and A142E; F6Y, E27H, I49K, D77G, S82T, R107C, G112H, G115M, N127P, and A142E; F6Y, E27H, I49K, D77G, S82T, R107C, G112H, G115M, A142E, and A143E; F6Y, E27H, I49K, D77G, S82T, R107C, Gi 12H, Gi 15M, and A143E; F6Y, E27H, I49K, S82T, R107C, G112H, A114C, G115M, D119N, and A142E; F6Y, E27H, I49K, S82T, R107C, Gi 12H, A114C, G115M, H122G, and A142E; F6Y, E27H, I49K, S82T, R107C, G112H, A114C, G115M, N127P, and A142E; F6Y, E27H, I49K, S82T, R107C, G112H, G115M, D119N, H122G, and A142E; F6Y, E27H, I49K, S82T, R107C, G112H, G115M, D119N, N127P, and A142E; F6Y, E27H, I49K, S82T, R107C, G112H, G115M, H122G, N127P, and A142E; F6Y, E27H, I49K, Y76W, D77G, S82T, R107C, G112H, A114C, G115M, and A142E; F6Y, E27H, I49K, Y76W, D77G, S82T, R107C, G112H, Gi 15M, D119N, and A142E; F6Y, E27H, I49K, Y76W, D77G, S82T, R107C, G112H, G115M, H122G, and A142E; F6Y, E27H, I49K, Y76W, D77G, S82T, R107C, G112H, Gi 15M, N127P, and A142E; F6Y, E27H, I49K, Y76W, D77G, S82T, R107C, G112H, G115M, A142E, and A143E; F6Y, E27H, I49K, Y76W, D77G, S82T, R107C, Gi 12H, Gi 15M, and A143E; F6Y, E27H, I49K, Y76W, S82T, R107C, G112H, A114C, G115M, D119N, and A142E; F6Y, E27H, I49K, Y76W, S82T, R107C, G112H, A114C, G115M, H122G, and A142E; F6Y, E27H, I49K, Y76W, S82T, R107C, G112H, A114C, G115M, N127P, and A142E; F6Y, E27H, I49K, Y76W, S82T, R107C, G112H, A114C, G115M, A142E, and A143E; F6Y, E27H, I49K, Y76W, S82T, R107C, G112H, A114C, G115M, and A143E; F6Y, E27H, I49K, Y76W, S82T, R107C, G112H, G115M, D119N, H122G, and A142E; F6Y, E27H, I49K, Y76W, S82T, R107C, G112H, G115M, D119N, N127P, and A142E; F6Y, E27H, I49K, Y76W, S82T, R107C, Gi 12H, Gi 15M, H122G, N127P, and A142E; F6Y, E27H, I49K, Y76W, S82T, R107C, G112H, A114C, G115M, D119N, H122G, and A142E; F6Y, E27H, I49K, Y76W, S82T, R107C, G112H, A114C, G115M, D119N, N127P, and A142E; F6Y, E27H, I49K, Y76W, S82T, R107C, G112H, A114C, G115M, H122G, N127P, and A142E; F6Y, E27H, I49K, Y76W, D77G, S82T, R107C, G112H, A114C, G115M, D119N, and A142E; F6Y, E27H, I49K, Y76W, D77G, S82T, R107C, Gi 12H, A114C, Gi 15M, H122G, and A142E; F6Y, E27H, I49K, Y76W, D77G, S82T, R107C, Gi 12H, A114C, Gi 15M, N127P, and A142E; F6Y, E27H, I49K, Y76W, D77G, S82T, R107C, Gi 12H, A114C, G115M, A142E, and A143E; F6Y, E27H, I49K, Y76W, D77G, S82T, R107C, G112H, A114C, G115M, and A143E; F6Y, E27H, I49K, Y76W, D77G, S82T, R107C, G112H, A114C, G115M, D119N, H122G, and A142E; F6Y, E27H, I49K, Y76W, D77G, S82T, R107C, G112H, A114C, G115M, D119N, N127P, and A142E; F6Y, E27H, I49K, Y76W, D77G, S82T, R107C, Gi 12H, A114C, Gi 15M, H122G, N127P, and A142E; F6Y, E27H, I49K, Y76W, S82T, R107C, G112H, A114C, G115M, D119N, H122G, N127P, A142E, and A143E; F6Y, E27H, I49K, Y76W, S82T, R107C, G112H, A114C, G115M, D119N, H122G, N127P, and A143E; F6Y, E27H, I49K, Y76W, D77G, S82T, R107C, G112H, A114C, G115M, D119N, H122G, N127P, A142E, and A143E; and F6Y, E27H, I49K, Y76W, D77G, S82T, R107C, G112H, A114C, G115M, D119N, H122G, N127P, and A143E; of an amino acid sequence having at least about 70%, 75%, 80%, 85%, 90%, 95%, 98%, 99% or greater identity to SEQ ID NO: 1, or a corresponding combination of alterations in another deaminase.

[0677] In some embodiments, the adenosine deaminase variant is an adenosine deaminase comprising an amino acid alteration or combination of amino acid alterations selected from those listed in any of Tables 5.2A-5.2F.

[0678] The residue identity of exemplary adenosine deaminase variants that are capable of deaminating adenine and/or cytidine in a target polynucleotide (e.g., DNA) is provided in Tables 5.2A-5.2F below. Further examples of adenosine deaminse variants include the following variants of 1.17 (see Table 5.2A): 1.17+E27H; 1.17+E27K; 1.17+E27S; 1.17+E27S+I49K; 1.17+E27G; 1.17+I49N; 1.17+E27G+I49N; and 1.17+E27Q. In some embodiments, any of the amino acid alterations provided herein are substituted with a conservative amino acid. Additional mutations known in the art can be further added to any of the adenosine deaminase variants provided herein.

[0679] In some embodiments, base editing is carried out to induce therapeutic changes in the genome of a cell of a subject (e.g., human). Cells are collected from a subject and contacted with one or more guide RNAs and a nucleobase editor polypeptide comprising a nucleic acid programmable DNA binding protein (napDNAbp) (e.g., Cas9) and an adenosine deaminase variant capable of deaminating both adenine and cytosine in a target polynucleotide (e.g., DNA).

[0680] In some embodiments, cells are contacted with one or more guide RNAs and a fusion protein comprising a nucleic acid programmable DNA binding protein (napDNAbp) (e.g., Cas9) and an adenosine deaminase variant capable of deaminating both adenine and cytosine in a target polynucleotide (e.g., DNA). In some embodiments, the napDNAbp is a Cas9.

[0681] In some embodiments, cells are contacted with a multi-molecular complex. In some embodiments, cells are contacted with a base editor system as provided herein. In some embodiments, the base editor systems as provided herein comprise an adenosine base editor (ABE) variant (e.g., a CABE). In some embodiments, the CABE variant is an ABE8 variant. In some embodiments, the ABE8 variant is an ABE8.20 variant. In some embodiments, CABEs as provided herein have both A to G and C to T base editing activity. Therefore, multiple edits may be introduced into the genome of a subject (e.g., human). The ability to target both A to G and C to T base editing activity allows for diverse targeting of polynucleotides in the genome in a subject to treat a genetic disease or disorder.

[0682] In some embodiments, the base editor systems comprising a CABE provided herein have at least about a 30%, 40%, 50%, 60%, 70% or more C to T editing activity in a target polynucleotide (e.g., DNA). In some embodiments, a base editor system comprising a CABE as provided herein has an increased C to T base editing activity (e.g., increased at least about 30-fold, 40-fold, 50-fold, 60-fold, 70-fold or more) relative to a reference base editor system comprising a reference adenosine deaminase (e.g., TadA*8.20 or TadA*8.19).

TABLE 5.2A
Adenosine Deaminase Variants (CABE-1; T_{AD}AC-1). Mutations are indicated with reference to TadA*8.20.

| | location in structure | | | | | | | | | | | | | |
|---|---|---|---|---|---|---|---|---|---|---|---|---|---|---|
| | | | | | near | near | near | near | | | | | | |
| | | surface | surface | surface | active | active | active | active | | | | | | |
| | N/A | h1 | h1 | h1 | site | site | site | site | | surface | | | | |
| | Amino Acid No. (*START Met is AA#1) | | | | | | | | | | | | | |
| | 2 | 8 | 13 | 17 | 27 | 47 | 48 | 49 | 67 | 76 | 77 | | | |
| | TadA*8.20 | | | | | | | | | | | | | |
| | S | H | R | T | E | R | A | I | G | Y | D | | | |
| | TadA*8.19 | | | | | | | | | | | Plasmid #s | | |
| | | | | | | | | | | I | | without ugi | with ugi | bacterial |
| 1.1 | | | | | H | | | | | I | | pDKL-11 | pDKL-23 | pDKL-35 |
| 1.2 | | | | | H | | | K | | I | | pDKL-12 | pDKL-24 | pDKL-36 |
| 1.3 | | | | | S | | | K | | I | | pDKL-13 | pDKL-25 | pDKL-37 |
| 1.4 | | | | | S | | | K | | I | | pDKL-14 | pDKL-26 | pDKL-38 |
| 1.5 | | | | | K | | | | | | | pDKL-15 | pDKL-27 | pDKL-39 |
| 1.6 | | | | | K | | | | | | | pDKL-16 | pDKL-28 | pDKL-40 |
| 1.7 | | | | | H | | | | | I | | pDKL-17 | pDKL-29 | pDKL-41 |
| 1.8 | | | | | S | | | K | W | | | pDKL-18 | pDKL-30 | pDKL-42 |
| 1.9 | | | | | | | | T | W | | | pDKL-19 | pDKL-31 | pDKL-43 |
| 1.10 | | | | | C | | | | | I | | pDKL-20 | pDKL-32 | pDKL-44 |
| 1.11 | | | G | | Q | | | | | | | pDKL-21 | pDKL-33 | pDKL-45 |
| 1.12 | | | | A | H | | | M | | I | | pDKL-22 | pDKL-34 | pDKL-46 |
| 1.13 | | | | | | | | Q | | I | | pDKL-47 | pDKL-55 | pDKL-63 |
| 1.14 | H | | | | | | | K | | I | | pDKL-48 | pDKL-56 | pDKL-64 |
| 1.15 | | | | | | S | | | | | | pDKL-49 | pDKL-57 | pDKL-65 |
| 1.16 | | Q | | | | | | Q | | I | | pDKL-50 | pDKL-58 | pDKL-66 |
| 1.17 | | | | A | | | G | | | | | pDKL-51 | pDKL-59 | pDKL-67 |
| 1.18 | | | | | G | | | | | | | pDKL-52 | pDKL-60 | pDKL-68 |
| 1.19 | | | | | G | | | N | | | | pDKL-53 | pDKL-61 | pDKL-69 |
| 1.20 | | | | | G | | | | | | G | pDKL-54 | pDKL-62 | pDKL-70 |

| | location in structure | | | | | | | | | | | | | | |
|---|---|---|---|---|---|---|---|---|---|---|---|---|---|---|---|
| | | near | | near | | | | | | | | | | | |
| | | active | | active | | | | | | | | | | | |
| | internal | site | | site | surface | | surface | surface | surface | | surface | | | | |
| | Amino Acid No. (*START Met is AA#1) | | | | | | | | | | | | | | |
| | 82 | 84 | 96 | 107 | 112 | 115 | 118 | 119 | 127 | 142 | 162 | 165 | | | |
| | TadA*8.20 | | | | | | | | | | | | | | |
| | S | F | H | R | G | G | M | D | N | A | A | S | Plasmid #s | | |
| | TadA*8.19 | | | | | | | | | | | | without ugi | with ugi | bacterial |
| 1.1 | | M | | | | | | | | | | | pDKL-11 | pDKL-23 | pDKL-35 |
| 1.2 | | | | | | | | | | | | | pDKL-12 | pDKL-24 | pDKL-36 |
| 1.3 | | | | | | | | | | | | | pDKL-13 | pDKL-25 | pDKL-37 |
| 1.4 | | | | | | | | | | | N | | pDKL-14 | pDKL-26 | pDKL-38 |
| 1.5 | | | | | | | | | | | | | pDKL-15 | pDKL-27 | pDKL-39 |
| 1.6 | | | | | | | | N | | | | | pDKL-16 | pDKL-28 | pDKL-40 |
| 1.7 | | | | | | | | | | | | | pDKL-17 | pDKL-29 | pDKL-41 |
| 1.8 | | | | | | | | | | | | | pDKL-18 | pDKL-30 | pDKL-42 |
| 1.9 | | | N | | | | | | | | | | pDKL-19 | pDKL-31 | pDKL-43 |
| 1.10 | | | | | | | | N | | | | | pDKL-20 | pDKL-32 | pDKL-44 |
| 1.11 | | | | | | | | | K | | | | pDKL-21 | pDKL-33 | pDKL-45 |
| 1.12 | | | | | | | L | | | | | | pDKL-22 | pDKL-34 | pDKL-46 |
| 1.13 | | | | | | M | | | | | | | pDKL-47 | pDKL-55 | pDKL-63 |
| 1.14 | | | | | H | | | | | | | | pDKL-48 | pDKL-56 | pDKL-64 |
| 1.15 | | | | C | | | | | | | | | pDKL-49 | pDKL-57 | pDKL-65 |
| 1.16 | | | | | | | | | | | | | pDKL-50 | pDKL-58 | pDKL-66 |
| 1.17 | T | | | | | | | | | E | | | pDKL-51 | pDKL-59 | pDKL-67 |
| 1.18 | | | | | | | | | | | | | pDKL-52 | pDKL-60 | pDKL-68 |
| 1.19 | | | | | | | | | | | | | pDKL-53 | pDKL-61 | pDKL-69 |
| 1.20 | | | | | | | | | | | | P | pDKL-54 | pDKL-62 | pDKL-70 |

TABLE 5.2B
Rationally Designed Candidate Editors (CABE-2s; TADAC-
2s). Mutations are indicated with reference to TadA*8.20.

| | Position No. | | | | | | | | | |
|---|---|---|---|---|---|---|---|---|---|---|
| | 27 | 29 | 30 | 49 | 82 | 84 | 107 | 112 | 115 | 142 |
| | TadA*8.20 | | | | | | | | | |
| | E | P | V | I | S | F | R | G | G | A |
| | Alterations Evaluated | | | | | | | | | |
| | G/S/H | G/A/K | I/L/F | K | T | L/A | C | H | M | E |
| S1.1 | S | | | K | T | | | | | |
| S1.2 | S | | | K | T | | C | | | |
| S1.3 | S | | | K | T | | | H | | |
| S1.4 | S | | | K | T | | | | M | |
| S1.5 | S | | | K | T | | | | | E |
| S1.6 | S | | | K | T | | C | H | | |
| S1.7 | S | | | K | T | | C | | M | |
| S1.8 | S | | | K | T | | C | | | E |
| S1.9 | S | | | K | T | | | H | | E |
| S1.10 | S | | | K | T | | | | M | E |
| S1.11 | S | | | K | T | | C | H | M | E |
| S1.12 | S | | I | K | T | | | | | |
| S1.13 | S | | I | K | T | | C | | | |
| S1.14 | S | | I | K | T | | | H | | |
| S1.15 | S | | I | K | T | | | | M | |
| S1.16 | S | | I | K | T | | | | | E |
| S1.17 | S | | I | K | T | | C | H | | |
| S1.18 | S | | I | K | T | | C | | M | |
| S1.19 | S | | I | K | T | | C | | | E |
| S1.20 | S | | I | K | T | | | H | | E |
| S1.21 | S | | I | K | T | | | | M | E |
| S1.22 | S | | I | K | T | | C | H | M | E |
| S1.23 | S | | L | K | T | | | | | |
| S1.24 | S | | L | K | T | | C | | | |
| S1.25 | S | | L | K | T | | | H | | |
| S1.26 | S | | L | K | T | | | | M | |
| S1.27 | S | | L | K | T | | | | | E |
| S1.28 | S | | L | K | T | | C | H | | |
| S1.29 | S | | L | K | T | | C | | M | |
| S1.30 | S | | L | K | T | | C | | | E |
| S1.31 | S | | L | K | T | | | H | | E |
| S1.32 | S | | L | K | T | | | | M | E |
| S1.33 | S | | L | K | T | | C | H | M | E |
| S1.34 | S | | F | K | T | A | | | | |
| S1.35 | S | | F | K | T | A | C | | | |
| S1.36 | S | | F | K | T | A | | H | | |
| S1.37 | S | | F | K | T | A | | | M | |
| S1.38 | S | | F | K | T | A | | | | E |
| S1.39 | S | | F | K | T | A | C | H | | |
| S1.40 | S | | F | K | T | A | C | | M | |
| S1.41 | S | | F | K | T | A | C | | | E |
| S1.42 | S | | F | K | T | A | | H | | E |
| S1.43 | S | | F | K | T | A | | | M | E |
| S1.44 | S | | F | K | T | A | C | H | M | E |
| S1.45 | S | | | K | T | L | | | | |
| S1.46 | S | | | K | T | L | C | | | |
| S1.47 | S | | | K | T | L | | H | | |
| S1.48 | S | | | K | T | L | | | M | |
| S1.49 | S | | | K | T | L | | | | E |
| $1.50 | S | | | K | T | L | C | H | | |
| S1.51 | S | | | K | T | L | C | | M | |
| S1.52 | S | | | K | T | L | C | | | E |
| S1.53 | S | | | K | T | L | | H | | E |
| S1.54 | S | | | K | T | L | | | M | E |
| $1.55 | S | | | K | T | L | C | H | M | E |
| S1.56 | S | | I | K | T | L | | | | |
| S1.57 | S | | I | K | T | L | C | | | |
| S1.58 | S | | I | K | T | L | | H | | |
| $1.59 | S | | I | K | T | L | | | M | |
| S1.60 | S | | I | K | T | L | | | | E |
| S1.61 | S | | I | K | T | L | C | H | | |
| S1.62 | S | | I | K | T | L | C | | M | |
| S1.63 | S | | I | K | T | L | | | | E |
| S1.64 | S | | I | K | T | L | | H | | E |
| S1.65 | S | | I | K | T | L | | | M | E |
| S1.66 | S | | I | K | T | L | C | H | M | E |
| S1.67 | S | G | | K | T | | | | | |
| S1.68 | S | G | | K | T | | C | | | |
| S1.69 | S | G | | K | T | | | H | | |
| S1.70 | S | G | | K | T | | | | M | |
| S1.71 | S | G | | K | T | | | | | E |
| S1.72 | S | G | | K | T | | C | H | | |
| S1.73 | S | G | | K | T | | C | | M | |
| S1.74 | S | G | | K | T | | C | | | E |
| S1.75 | S | G | | K | T | | | H | | E |
| S1.76 | S | G | | K | T | | | | M | E |
| S1.77 | S | G | | K | T | | C | H | M | E |
| S1.78 | | G | | K | T | | | | | |
| S1.79 | | G | | K | T | | C | | | |
| $1.80 | | G | | K | T | | | H | | |
| S1.81 | | G | | K | T | | | | M | |
| S1.82 | | G | | K | T | | | | | E |
| S1.83 | | G | | K | T | | C | H | | |
| S1.84 | | G | | K | T | | | | M | |
| S1.85 | | G | | K | T | | C | | | E |
| S1.86 | | G | | K | T | | | H | | E |
| S1.87 | | G | | K | T | | | | M | E |
| S1.88 | | G | | K | T | | C | H | M | E |
| S1.89 | | K | | K | T | | | | | |
| S1.90 | | K | | K | T | | C | | | |
| S1.91 | | K | | K | T | | | H | | |
| S1.92 | | K | | K | T | | | | M | |
| S1.93 | | K | | K | T | | | | | E |
| S1.94 | | K | | K | T | | C | H | | |
| S1.95 | | K | | K | T | | C | | M | |
| S1.96 | | K | | K | T | | C | | | E |
| S1.97 | | K | | K | T | | | H | | E |
| S1.98 | | K | | K | T | | | | M | E |
| S1.99 | | K | | K | T | | C | H | M | E |
| S1.100 | | K | I | K | T | | | | | |
| S1.101 | | K | I | K | T | | C | | | |
| S1.102 | | K | I | K | T | | | H | | |
| S1.103 | | K | I | K | T | | | | M | |
| S1.104 | | K | I | K | T | | | | | E |
| S1.105 | | K | I | K | T | | C | H | | |
| S1.106 | | K | I | K | T | | C | | M | |
| S1.107 | | K | I | K | T | | C | | | E |
| S1.108 | | K | I | K | T | | | H | | E |
| S1.109 | | K | I | K | T | | | | M | E |
| S1.110 | | K | I | K | T | | C | H | M | E |
| S1.111 | | K | | K | T | L | | | | |
| S1.112 | | K | | K | T | L | C | | | |
| S1.113 | | K | | K | T | L | | H | | |
| S1.114 | | K | | K | T | L | | | M | |
| S1.115 | | K | | K | T | L | | | | E |
| S1.116 | | K | | K | T | L | C | H | | |
| S1.117 | | K | | K | T | L | C | | M | |
| S1.118 | | K | | K | T | L | | | | E |
| S1.119 | | K | | K | T | L | | H | | E |
| S1.120 | | K | | K | T | L | | | M | E |
| S1.121 | | K | | K | T | L | C | H | M | E |
| S1.122 | | K | I | K | T | L | | | | |
| S1.123 | | K | I | K | T | L | C | | | |
| S1.124 | | K | I | K | T | L | | H | | |
| S1.125 | | K | I | K | T | L | | | M | |
| S1.126 | | K | I | K | T | L | | | | E |
| S1.127 | | K | I | K | T | L | C | H | | |
| S1.128 | | K | I | K | I | L | C | | M | |
| S1.129 | | K | I | K | T | L | C | | | E |
| S1.130 | | K | I | K | T | L | | H | | E |
| S1.131 | | K | I | K | T | L | | | M | E |
| S1.132 | | K | I | K | T | L | C | H | M | E |
| S1.133 | G | | | K | T | | | | | |
| S1.134 | G | | | K | T | | C | | | |
| S1.135 | G | | | K | T | | | H | | |
| S1.136 | G | | | K | T | | | | M | |
| S1.137 | G | | | K | T | | | | | E |
| S1.138 | G | | | K | T | | C | H | | |
| S1.139 | G | | | K | T | | C | | M | |
| S1.140 | G | | | K | T | | C | | | E |
| S1.141 | G | | | K | T | | | H | | E |
| S1.142 | G | | | K | T | | | | M | E |
| S1.143 | G | | | K | T | | C | H | M | E |
| S1.144 | H | | | K | T | | | | | |
| S1.145 | H | | | K | T | | C | | | |
| S1.146 | H | | | K | T | | | H | | |
| S1.147 | H | | | K | T | | | | M | |
| S1.148 | H | | | K | T | | | | | E |
| S1.149 | H | | | K | H | | C | H | | |
| S1.150 | H | | | K | T | | C | | M | |
| S1.151 | H | | | K | T | | | | | E |
| $1.152 | H | | | K | T | | | H | | E |
| S1.153 | H | | | K | T | | | | M | E |
| S1.154 | H | | | K | T | | C | H | M | E |
| S1.155 | S | | | | T | | | | | |
| S1.156 | S | | | | T | | C | | | |
| S1.157 | S | | | | T | | | H | | |
| S1.158 | S | | | | T | | | | M | |
| S1.159 | S | | | | T | | | | | E |
| S1.160 | S | | | | T | | C | H | | |
| S1.161 | S | | | | T | | C | | M | |
| S1.162 | S | | | | T | | C | | | E |
| S1.163 | S | | | | T | | | H | | E |
| S1.164 | S | | | | T | | | | M | E |
| S1.165 | S | | | | T | | C | H | M | E |
| S1.166 | | A | | | T | | | | | |
| S1.167 | | A | | | T | | C | | | |
| S1.168 | | A | | | T | | | H | | |
| S1.169 | | A | | | T | | | | M | |
| S1.170 | | A | | | T | | | | | E |
| S1.171 | | A | | | T | | C | H | | |
| S1.172 | | A | | | T | | | | M | |
| S1.173 | | A | | | T | | C | | | E |
| S1.174 | | A | | | T | | | H | | E |
| S1.175 | | A | | | T | | | | M | E |
| S1.176 | | A | | | T | | C | H | M | E |
| S1.177 | S | | I | | T | | | | | |
| S1.178 | S | | I | | T | | C | | | |
| S1.179 | S | | I | | T | | | H | | |
| $1.180 | S | | I | | T | | | | M | |
| S1.181 | S | | I | | T | | | | | E |
| S1.182 | S | | I | | T | | C | H | | |
| S1.183 | S | | I | | T | | C | | M | |
| S1.184 | S | | I | | T | | C | | | E |
| S1.185 | S | | I | | T | | | H | | E |
| S1.186 | S | | I | | T | | | | M | E |
| S1.187 | S | | I | | T | | C | H | M | E |
| S1.188 | | A | I | | T | L | | | | |
| S1.189 | | A | I | | T | L | C | | | |
| S1.190 | | A | I | | T | L | | H | | |
| S1.191 | | A | I | | T | L | | | M | |
| S1.192 | | A | I | | T | L | | | | E |
| S1.193 | | A | I | | T | L | C | H | | |
| S1.194 | | A | I | | T | L | C | | M | |
| S1.195 | | A | I | | T | L | C | | | E |
| S1.196 | | A | I | | T | L | | H | | E |
| S1.197 | | A | I | | T | L | | | M | E |
| S1.198 | | A | I | | T | L | C | H | M | E |
| S1.199 | S | A | L | K | T | L | C | H | M | E |

TABLE 5.2C
Candidate base editors (CABE-2e; TADAC-2e). Mutations are
indicated with reference to variant 1.2 (Table 5.2A) .

| | Alternative Variant | Residue identity (START Met is amino acid #1) | | | | | | | | | |
|---|---|---|---|---|---|---|---|---|---|---|---|
| Variant Name | Names | 4 | 6 | 17 | 23 | 76 | 77 | 100 | 111 | 114 | 119 |
| Reference | 1.2 (see Table 1A) | V | F | T | R | I | D | G | T | A | D |
| TadAC2.1 | pDKL-135; 2.1 | K | | | | | | | | C | |
| TadAC2.2 | pDKL-136; 2.2 | K | | | | | G | | | | |
| TadAC2.3 | pDKL-137; 2.3 | | Y | | | | | A | | | |
| TadAC2.4 | pDKL-138; 2.4 | T | | | | R | | | | | |
| TadAC2.5 | pDKL-139; 2.5 | | Y | | | W | | | | | |
| TadAC2.6 | pDKL-140; 2.6 | | Y | | | | | | | | N |
| TadAC2.7 | pDKL-141; 2.7 | | Y | | | | | | | C | |
| TadAC2.8 | pDKL-142; 2.8 | | Y | | | | | | | | |
| TadAC2.9 | pDKL-143; 2.9 | K | | | | W | | | | | |
| TadAC2.10 | pDKL-144; 2.10 | | G | | | R | | K | | | |
| TadAC2.11 | pDKL-145; 2.11 | | H | | | | | | | | |
| TadAC2.12 | pDKL-146; 2.12 | | | | | | | | | C | |
| TadAC2.13 | pDKL-147; 2.13 | | Y | | | H | | | | | |
| TadAC2.14 | pDKL-148; 2.14 | | | | | | | | | | |
| TadAC2.15 | pDKL-149; 2.15 | | | | Q | R | | | | | |
| TadAC2.16 | pDKL-150; 2.16 | | | | | H | | | | | |
| TadAC2.17 | pDKL-151; 2.17 | | Y | | | | | | H | | |
| TadAC2.18 | pDKL-152; 2.18 | | | | | W | | | | | |
| TadAC2.19 | pDKL-153; 2.19 | | | | | | | | H | | |
| TadAC2.20 | pDKL-154; 2.20 | | | | | | | | | | |
| TadAC2.21 | pDKL-155; 2.21 | | Y | | | R | | | | | |
| TadAC2.22 | pDKL-156; 2.22 | | | W | | H | | | | | |
| TadAC2.23 | pDKL-157; 2.23 | S | | | | Y | | | | | |
| TadAC2.24 | pDKL-158; 2.24 | | | | | | | | | | |

| | Alternative Variant | Residue identity (START Met is amino acid #1) | | | | | | | |
|---|---|---|---|---|---|---|---|---|---|
| Variant Name | Names | 122 | 127 | 143 | 147 | 158 | 159 | 162 | 166 |
| Reference | 1.2 (see Table 1A) | H | N | A | R | A | Q | A | T |
| TadAC2.1 | pDKL-135; 2.1 | | | | | | | | |
| TadAC2.2 | pDKL-136; 2.2 | | | | | | | | |
| TadAC2.3 | pDKL-137; 2.3 | R | | | | | | | |
| TadAC2.4 | pDKL-138; 2.4 | G | | | | | | | |
| TadAC2.5 | pDKL-139; 2.5 | | | | | | | | |
| TadAC2.6 | pDKL-140; 2.6 | | | | | | | | |
| TadAC2.7 | pDKL-141; 2.7 | | | | | | | | |
| TadAC2.8 | pDKL-142; 2.8 | | | | | | | | |
| TadAC2.9 | pDKL-143; 2.9 | T | | | | | | | |
| TadAC2.10 | pDKL-144; 2.10 | | | | | | | | |
| TadAC2.11 | pDKL-145; 2.11 | N | | | | | | | |
| TadAC2.12 | pDKL-146; 2.12 | | | | | | | | |
| TadAC2.13 | pDKL-147; 2.13 | R | | | | | | | I |
| TadAC2.14 | pDKL-148; 2.14 | | P | | | | | | |
| TadAC2.15 | pDKL-149; 2.15 | | | | | | | | |
| TadAC2.16 | pDKL-150; 2.16 | R | | | | V | | | |
| TadAC2.17 | pDKL-151; 2.17 | | | | | | | | |
| TadAC2.18 | pDKL-152; 2.18 | | | | | | | | |
| TadAC2.19 | pDKL-153; 2.19 | G | | | | | | C | |
| TadAC2.20 | pDKL-154; 2.20 | | | E | | | | | |
| TadAC2.21 | pDKL-155; 2.21 | | | | | | | | |
| TadAC2.22 | pDKL-156; 2.22 | G | | | | V | | | |
| TadAC2.23 | pDKL-157; 2.23 | | | E | | | S | | |
| TadAC2.24 | pDKL-158; 2.24 | | I | | | | | Q | |

TABLE 5.2D
Rationally Designed Candidate Editors (CBE-T1; TADC-
1). Mutations are indicated with reference to ABE8.20m.

| | AA Positions | | | | | | | | | | | | | | |
|---|---|---|---|---|---|---|---|---|---|---|---|---|---|---|---|
| | 6 | 27 | 49 | 76 | 77 | 82 | 107 | 112 | 114 | 115 | 119 | 122 | 127 | 142 | 143 |
| | TadA8.20 | | | | | | | | | | | | | | |
| | F | E | I | Y | D | S | R | G | A | G | D | H | N | A | A |
| S1.154 | F | H | K | Y | D | T | C | H | | M | | | | E | |
| Alterations | Y | | | W | G | | | | C | | N | G | P | | E |
| from Table 1C | | | | | | | | | | | | | | | |
| S2.1 | Y | H | K | W | | T | C | H | | M | | | | E | |
| S2.2 | Y | H | K | | G | T | C | H | | M | | | | E | |
| S2.3 | Y | H | K | | | T | C | H | C | M | | | | E | |
| S2.4 | Y | H | K | | | T | C | H | | M | N | | | E | |
| S2.5 | Y | H | K | | | T | C | H | | M | | G | | E | |
| S2.6 | Y | H | K | | | T | C | H | | M | | | P | E | |
| S2.7 | Y | H | K | | | T | C | H | | M | | | | E | E |
| S2.8 | Y | H | K | | | T | C | H | | M | | | | A | E |
| S2.9 | Y | H | K | W | G | T | C | H | | M | | | | E | |
| S2.10 | Y | H | K | W | | T | C | H | C | M | | | | E | |
| S2.11 | Y | H | K | W | | T | C | H | | M | N | | | E | |
| S2.12 | Y | H | K | W | | T | C | H | | M | | G | | E | |
| S2.13 | Y | H | K | W | | T | C | H | | M | | | P | E | |
| S2.14 | Y | H | K | W | | T | C | H | | M | | | | E | E |
| S2.15 | Y | H | K | W | | T | C | H | | M | | | | A | E |
| S2.16 | Y | H | K | | G | T | C | H | C | M | | | | E | |
| S2.17 | Y | H | K | | G | T | C | H | | M | N | | | E | |
| S2.18 | Y | H | K | | G | T | C | H | | M | | G | | E | |
| S2.19 | Y | H | K | | | T | C | H | | M | | | P | E | |
| S2.20 | Y | H | K | | G | T | C | H | | M | | | | E | E |
| S2.21 | Y | H | K | | G | T | C | H | | M | | | | A | E |
| S2.22 | Y | H | K | | | T | C | H | C | M | N | | | E | |
| S2.23 | Y | H | K | | | T | C | H | C | M | | G | | E | |
| S2.24 | Y | H | K | | | T | C | H | C | M | | | P | E | |
| S2.25 | Y | H | K | | | T | C | H | | M | N | G | | E | |
| S2.26 | Y | H | K | | | T | C | H | | M | N | | P | E | |
| S2.27 | Y | H | K | | | T | C | H | | M | | G | P | E | |
| S2.28 | Y | H | K | | | T | C | H | C | M | | | | E | |
| S2.29 | Y | H | K | W | G | T | C | H | | M | N | | | E | |
| S2.30 | Y | H | K | W | G | T | C | H | | M | | G | | E | |
| S2.31 | Y | H | K | W | G | T | C | H | | M | | | P | E | |
| S2.32 | Y | H | K | W | G | T | C | H | | M | | | | E | E |
| S2.33 | Y | H | K | W | G | T | C | H | | M | | | | | E |
| S2.34 | Y | H | K | W | | T | C | H | C | M | N | | | E | |
| S2.35 | Y | H | K | W | | T | C | H | C | M | | G | | E | |
| S2.36 | Y | H | K | W | | T | C | H | C | M | | | P | E | |
| S2.37 | Y | H | K | W | | T | C | H | C | M | | | | E | E |
| S2.38 | Y | H | K | W | | T | C | H | C | M | | | | A | E |
| S2.39 | Y | H | K | W | | T | C | H | | M | N | G | | E | |
| S2.40 | Y | H | K | W | | T | C | H | | M | N | | P | E | |
| S2.41 | Y | H | K | W | | T | C | H | | M | | G | P | E | |
| S2.42 | Y | H | K | W | | T | C | H | C | M | N | G | | E | |
| S2.43 | Y | H | K | W | | T | C | H | C | M | N | | P | E | |
| S2.44 | Y | H | K | W | | T | C | H | C | M | | G | P | E | |
| S2.45 | Y | H | K | W | G | T | C | H | C | M | N | | | E | |
| S2.46 | Y | H | K | W | G | T | C | H | C | M | | G | | E | |
| S2.47 | Y | H | K | W | GT | T | C | H | C | M | | | P | E | |
| S2.48 | Y | H | K | W | G | T | C | H | C | M | | | | E | E |
| S2.49 | Y | H | K | W | G | T | C | H | C | M | | | | A | E |
| S2.50 | Y | H | K | W | G | T | C | H | C | M | N | G | | E | |
| S2.51 | Y | H | K | W | G | T | C | H | C | M | N | | P | E | |
| S2.52 | Y | H | K | W | G | T | C | H | C | M | | G | P | E | |
| S2.53 | Y | H | K | W | G | T | C | H | C | M | N | G | P | E | E |
| S2.54 | Y | H | K | W | | T | C | H | C | M | N | G | P | A | E |
| S2.55 | Y | H | K | W | G | T | C | H | C | M | N | G | P | E | E |
| S2.56 | Y | H | K | W | G | T | C | H | C | M | N | G | P | A | E |

TABLE 5.2E
Hybrid constructs. Mutations are indicated with reference to ABE7.10.

| | TadA amino acid subsitutions | | | | | | | | | | | |
|---|---|---|---|---|---|---|---|---|---|---|---|---|
| | 76 | 82 | 109 | 111 | 119 | 122 | 123 | 147 | 149 | 154 | 166 | 167 |
| ABE7.10 | I | V | A | T | D | H | Y | Y | F | Q | T | D |
| ABE8e | | | S | R | N | N | | D | Y | | I | N |
| ABE8.20 | Y | S | | | | | H | R | | R | | |
| ABE8.17 | | S | | | | | | | | R | | |
| pNMG- | Y | S | | | | | H | D | | R | | |
| B878 | | | | | | | | | | | | |
| pNMG- | Y | S | | | | | H | R | Y | R | | |
| B879 | | | | | | | | | | | | |
| pNMG- | Y | S | | | | | H | R | | R | I | |
| B880 | | | | | | | | | | | | |
| pNMG- | Y | S | | | | | H | R | | R | | N |
| B881 | | | | | | | | | | | | |
| pNMG- | Y | S | | | | | H | D | Y | R | I | N |
| B882 | | | | | | | | | | | | |
| pNMG- | Y | S | | R | N | | H | R | | R | | |
| B883 | | | | | | | | | | | | |
| pNMG- | Y | S | S | R | N | N | H | R | | R | | |
| B884 | | | | | | | | | | | | |
| pNMG- | Y | S | S | | | | H | R | | R | | |
| B885 | | | | | | | | | | | | |
| pNMG- | Y | S | | R | | | H | R | | R | | |
| B886 | | | | | | | | | | | | |
| pNMG- | Y | S | | | N | | H | R | | R | | |
| B887 | | | | | | | | | | | | |
| pNMG- | Y | S | | | | N | H | R | | R | | |
| B888 | | | | | | | | | | | | |
| pNMG- | Y | S | S | R | | | H | R | | R | | |
| B889 | | | | | | | | | | | | |
| pNMG- | Y | S | | | N | N | H | R | | R | | |
| B890 | | | | | | | | | | | | |
| pNMG- | Y | S | S | R | N | N | H | D | Y | R | I | N |
| B891 | | | | | | | | | | | | |

TABLE 5.2F
Base editor variants. Mutations are indicated with reference to ABE8.19m/8.20m.

| | AA positions: | | | | | | | | | | | | |
|---|---|---|---|---|---|---|---|---|---|---|---|---|---|
| | 17 | 27 | 48 | 49 | 76 | 82 | 84 | 118 | 142 | 147 | 149 | 166 | 167 |
| | ABE8.19m/8.20m | | | | | | | | | | | | |
| | T | E | A | I | Y/I | S | F | M | A | Y | F | T | D |
| 1.1 + 8e(B879) | | H | | | I | | M | | | | Y | | |
| 1.2 + 8e(B879) | | H | | K | I | | | | | | Y | | |
| 1.12 + 8e(B879) | A | H | | M | I | | | L | | | Y | | |
| 1.17 + 8e(B879) | A | | G | | | T | | | E | | Y | | |
| 1.18 + 8e(B879) | | G | | | | | | | | | Y | | |
| 1.19 + 8e(B879) | | G | | N | | | | | | | Y | | |
| 1.1 + 8e(B882) | | H | | | I | | M | | | D | Y | I | N |
| 1.2 + 8e(B882) | | H | | K | I | | | | | D | Y | I | N |
| 1.12 + 8e(B882) | A | H | | M | I | | | L | | D | Y | I | N |
| 1.17 + 8e(B882) | A | | G | | | T | | | E | D | Y | I | N |
| 1.18 + 8e(B882) | | G | | | | | | | | D | Y | I | N |
| 1.19 + 8e(B882) | | G | | N | | | | | | D | Y | I | N |

### Guide Polynucleotides

[0683] A polynucleotide programmable nucleotide binding domain, when in conjunction with a bound guide polynucleotide (e.g., gRNA), can specifically bind to a target polynucleotide sequence (i.e., via complementary base pairing between bases of the bound guide nucleic acid and bases of the target polynucleotide sequence) and thereby localize the base editor to the target nucleic acid sequence desired to be edited. In some embodiments, the target polynucleotide sequence comprises single-stranded DNA or double-stranded DNA. In some embodiments, the target polynucleotide sequence comprises RNA. In some embodiments, the target polynucleotide sequence comprises a DNA-RNA hybrid.

[0684] CRISPR is an adaptive immune system that provides protection against mobile genetic elements (viruses, transposable elements and conjugative plasmids). CRISPR clusters contain spacers, sequences complementary to antecedent mobile elements, and target invading nucleic acids. CRISPR clusters are transcribed and processed into CRISPR RNA (crRNA). In type II CRISPR systems, correct processing of pre-crRNA requires a trans-encoded small RNA (tracrRNA), endogenous ribonuclease 3 (rnc) and a Cas9 protein. The tracrRNA serves as a guide for ribonuclease 3-aided processing of pre-crRNA. Subsequently, Cas9/crRNA/tracrRNA endonucleolytically cleaves linear or circular dsDNA target complementary to the spacer. The target strand not complementary to crRNA is first cut endonucleolytically, and then trimmed 3′-5′ exonucleolytically. In nature, DNA-binding and cleavage typically requires protein and both RNAs. However, single guide RNAs (“sgRNA”, or simply “gRNA”) can be engineered so as to incorporate aspects of both the crRNA and tracrRNA into a single RNA species. See, e.g., Jinek M., et al. Science 337:816-821(2012), the entire contents of which is hereby incorporated by reference. Cas9 recognizes a short motif in the CRISPR repeat sequences (the PAM or protospacer adjacent motif) to help distinguish self versus non-self. See e.g., “Complete genome sequence of an M1 strain of Streptococcus pyogenes.” Ferretti, J. J. et al., Natl. Acad. Sci. U.S.A. 98:4658-4663(2001); “CRISPR RNA maturation by trans-encoded small RNA and host factor RNase III.” Deltcheva E. et al., Nature 471:602-607(2011); and “Programmable dual-RNA-guided DNA endonuclease in adaptive bacterial immunity.” Jinek M. et al, Science 337:816-821(2012), the entire contents of each of which are incorporated herein by reference).

[0685] The PAM sequence can be any PAM sequence known in the art. Suitable PAM sequences include, but are not limited to, NGG, NGA, NGC, NGN, NGT, NGCG, NGAG, NGAN, NGNG, NGCN, NGCG, NGTN, NNGRRT, NNNRRT, NNGRR(N), TTTV, TYCV, TYCV, TATV, NNNNGATT, NNAGAAW, or NAAAAC. Y is a pyrimidine; N is any nucleotide base; W is A or T.

[0686] In an embodiment, a guide polynucleotide described herein can be RNA or DNA. In one embodiment, the guide polynucleotide is a guide RNA (gRNA). Exemplary guide RNA sequences are provided in Tables 1A, 1B, and 1D and exemplary spacer and target sequences are provided in Tables 1A, 1B, 1C, 1E, and in the Sequence Listing as SEQ ID NOs: 1214-2908, 403-412, and 435-446. An RNA/Cas complex can assist in “guiding” a Cas protein to a target DNA. Cas9/crRNA/tracrRNA endonucleolytically cleaves linear or circular dsDNA target complementary to the spacer. The target strand not complementary to crRNA is first cut endonucleolytically, then trimmed 3′-5′ exonucleolytically. In nature, DNA-binding and cleavage typically requires protein and both RNAs. However, single guide RNAs (“sgRNA”, or simply “gRNA”) can be engineered so as to incorporate aspects of both the crRNA and tracrRNA into a single RNA species. See, e.g., Jinek M. et al., Science 337:816-821(2012), the entire contents of which is hereby incorporated by reference.

[0687] In some embodiments, the guide polynucleotide is at least one single guide RNA (“sgRNA” or “gRNA”). In some embodiments, a guide polynucleotide comprises two or more individual polynucleotides, which can interact with one another via for example complementary base pairing (e.g., a dual guide polynucleotide, dual gRNA). For example, a guide polynucleotide can comprise a CRISPR RNA (crRNA) and a trans-activating CRISPR RNA (tracrRNA) or can comprise one or more trans-activating CRISPR RNA (tracrRNA).

[0688] In some embodiments, the guide polynucleotide is at least one tracrRNA. In some embodiments, the guide polynucleotide does not require PAM sequence to guide the polynucleotide-programmable DNA-binding domain (e.g., Cas9 or Cpf1) to the target nucleotide sequence.

[0689] A guide polynucleotide may include natural or non-natural (or unnatural) nucleotides (e.g., peptide nucleic acid or nucleotide analogs). In some cases, the targeting region of a guide nucleic acid sequence can be at least 15, 16, 17, 18, 19, 20, 21, 22, 23, 24, 25, 26, 27, 28, 29, or 30 nucleotides in length. A targeting region of a guide nucleic acid can be between 10-30 nucleotides in length, or between 15-25 nucleotides in length, or between 15-20 nucleotides in length.

[0690] In some embodiments, the base editor provided herein utilizes one or more guide polynucleotide (e.g., multiple gRNA). In some embodiments, a single guide polynucleotide is utilized for different base editors described herein. For example, a single guide polynucleotide can be utilized for a cytidine base editor and an adenosine base editor.

[0691] In some embodiments, the methods described herein can utilize an engineered Cas protein. A guide RNA (gRNA) is a short synthetic RNA composed of a scaffold sequence necessary for Cas-binding and a user-defined ˜20 nucleotide spacer that defines the genomic target to be modified. Exemplary gRNA scaffold sequences are provided in Tables 1A, 1B, and 1D and in the sequence listing as SEQ ID NOs: 317-327. Thus, a skilled artisan can change the genomic target of the Cas protein specificity is partially determined by how specific the gRNA targeting sequence is for the genomic target compared to the rest of the genome.

[0692] In other embodiments, a guide polynucleotide comprises both the polynucleotide targeting portion of the nucleic acid and the scaffold portion of the nucleic acid in a single molecule (i.e., a single-molecule guide nucleic acid). For example, a single-molecule guide polynucleotide can be a single guide RNA (sgRNA or gRNA). Herein the term guide polynucleotide sequence contemplates any single, dual or multi-molecule nucleic acid capable of interacting with and directing a base editor to a target polynucleotide sequence.

[0693] Typically, a guide polynucleotide (e.g., crRNA/trRNA complex or a gRNA) comprises a “polynucleotide-targeting segment” that includes a sequence capable of recognizing and binding to a target polynucleotide sequence, and a “protein-binding segment” that stabilizes the guide polynucleotide within a polynucleotide programmable nucleotide binding domain component of a base editor. In some embodiments, the polynucleotide targeting segment of the guide polynucleotide recognizes and binds to a DNA polynucleotide, thereby facilitating the editing of a base in DNA. In other cases, the polynucleotide targeting segment of the guide polynucleotide recognizes and binds to an RNA polynucleotide, thereby facilitating the editing of a base in RNA. Herein a “segment” refers to a section or region of a molecule, e.g., a contiguous stretch of nucleotides in the guide polynucleotide. A segment can also refer to a region/section of a complex such that a segment can comprise regions of more than one molecule. For example, where a guide polynucleotide comprises multiple nucleic acid molecules, the protein-binding segment of can include all or a portion (e.g., a functional portion) of multiple separate molecules that are for instance hybridized along a region of complementarity. In some embodiments, a protein-binding segment of a DNA-targeting RNA that comprises two separate molecules comprises (i) base pairs 40-75 of a first RNA molecule that is 100 base pairs in length; and (ii) base pairs 10-25 of a second RNA molecule that is 50 base pairs in length. The definition of “segment,” unless otherwise specifically defined in a particular context, is not limited to a specific number of total base pairs, is not limited to any particular number of base pairs from a given RNA molecule, is not limited to a particular number of separate molecules within a complex, and can include regions of RNA molecules that are of any total length and can include regions with complementarity to other molecules.

[0694] The guide polynucleotides can be synthesized chemically, synthesized enzymatically, or a combination thereof. For example, the gRNA can be synthesized using standard phosphoramidite-based solid-phase synthesis methods. Alternatively, the gRNA can be synthesized in vitro by operably linking DNA encoding the gRNA to a promoter control sequence that is recognized by a phage RNA polymerase. Examples of suitable phage promoter sequences include T7, T3, SP6 promoter sequences, or variations thereof. In embodiments in which the gRNA comprises two separate molecules (e.g., crRNA and tracrRNA), the crRNA can be chemically synthesized and the tracrRNA can be enzymatically synthesized.

[0695] A guide polynucleotide may be expressed, for example, by a DNA that encodes the gRNA, e.g., a DNA vector comprising a sequence encoding the gRNA. The gRNA may be encoded alone or together with an encoded base editor. Such DNA sequences may be introduced into an expression system, e.g., a cell, together or separately. For example, DNA sequences encoding a polynucleotide programmable nucleotide binding domain and a gRNA may be introduced into a cell, each DNA sequence can be part of a separate molecule (e.g., one vector containing the polynucleotide programmable nucleotide binding domain coding sequence and a second vector containing the gRNA coding sequence) or both can be part of a same molecule (e.g., one vector containing coding (and regulatory) sequence for both the polynucleotide programmable nucleotide binding domain and the gRNA). An RNA can be transcribed from a synthetic DNA molecule, e.g., a gBlocks® gene fragment. A gRNA molecule can be transcribed in vitro.

[0696] A gRNA or a guide polynucleotide can comprise three regions: a first region at the 5′ end that can be complementary to a target site in a chromosomal sequence, a second internal region that can form a stem loop structure, and a third 3′ region that does not form a secondary structure or bind a target site. A first region of each gRNA can also be different such that each gRNA guides a fusion protein or complex to a specific target site. Further, second and third regions of each gRNA can be identical in all gRNAs.

[0697] A first region of a gRNA or a guide polynucleotide can be complementary to sequence at a target site in a chromosomal sequence such that the first region of the gRNA can base pair with the target site. In some cases, a first region of a gRNA comprises from or from about 10 nucleotides to 25 nucleotides (i.e., from 10 nucleotides to nucleotides; or from about 10 nucleotides to about 25 nucleotides; or from 10 nucleotides to about 25 nucleotides; or from about 10 nucleotides to 25 nucleotides) or more. For example, a region of base pairing between a first region of a gRNA and a target site in a chromosomal sequence can be or can be about 10, 11, 12, 13, 14, 15, 16, 17, 18, 19, 20, 22, 23, 24, 25, or more nucleotides in length. Sometimes, a first region of a gRNA can be or can be about 19, 20, or 21 nucleotides in length.

[0698] A gRNA or a guide polynucleotide can also comprise a second region that forms a secondary structure. For example, a secondary structure formed by a gRNA can comprise a stem (or hairpin) and a loop. A length of a loop and a stem can vary. For example, a loop can range from or from about 3 to 10 nucleotides in length, and a stem can range from or from about 6 to 20 base pairs in length. A stem can comprise one or more bulges of 1 to 10 or about 10 nucleotides. The overall length of a second region can range from or from about 16 to 60 nucleotides in length. For example, a loop can be or can be about 4 nucleotides in length and a stem can be or can be about 12 base pairs.

[0699] A gRNA or a guide polynucleotide can also comprise a third region at the 3′ end that can be essentially single-stranded. For example, a third region is sometimes not complementarity to any chromosomal sequence in a cell of interest and is sometimes not complementarity to the rest of a gRNA. Further, the length of a third region can vary. A third region can be more than or more than about 4 nucleotides in length. For example, the length of a third region can range from or from about 5 to 60 nucleotides in length.

[0700] A gRNA or a guide polynucleotide can target any exon or intron of a gene target. In some cases, a guide can target exon 1 or 2 of a gene, in other cases; a guide can target exon 3 or 4 of a gene. In some embodiments, a composition comprises multiple gRNAs that all target the same exon or multiple gRNAs that target different exons. An exon and/or an intron of a gene can be targeted.

[0701] A gRNA or a guide polynucleotide can target a nucleic acid sequence of about 20 nucleotides or less than about 20 nucleotides (e.g., at least about 5, 10, 15, 16, 17, 18, 19, 20, 21, 22, 23, 24, 25, 30 nucleotides), or anywhere between about 1-100 nucleotides (e.g., 5, 10, 15, 16, 17, 18, 19, 20, 21, 22, 23, 24, 25, 30, 40, 50, 60, 70, 80, 90, 100). A target nucleic acid sequence can be or can be about 20 bases immediately 5′ of the first nucleotide of the PAM. A gRNA can target a nucleic acid sequence. A target nucleic acid can be at least or at least about 1-10, 1-20, 1-30, 1-40, 1-50, 1-60, 1-70, 1-80, 1-90, or 1-100 nucleotides.

[0702] Methods for selecting, designing, and validating guide polynucleotides, e.g., gRNAs and targeting sequences are described herein and known to those skilled in the art. For example, to minimize the impact of potential substrate promiscuity of a deaminase domain in the nucleobase editor system (e.g., an AID domain), the number of residues that could unintentionally be targeted for deamination (e.g., off-target C residues that could potentially reside on single strand DNA within the target nucleic acid locus) may be minimized. In addition, software tools can be used to optimize the gRNAs corresponding to a target nucleic acid sequence, e.g., to minimize total off-target activity across the genome. For example, for each possible targeting domain choice using S. pyogenes Cas9, all off-target sequences (preceding selected PAMs, e.g., NAG or NGG) may be identified across the genome that contain up to certain number (e.g., 1, 2, 3, 4, 5, 6, 7, 8, 9, or 10) of mismatched base-pairs. First regions of gRNAs complementary to a target site can be identified, and all first regions (e.g., crRNAs) can be ranked according to its total predicted off-target score; the top-ranked targeting domains represent those that are likely to have the greatest on-target and the least off-target activity. Candidate targeting gRNAs can be functionally evaluated by using methods known in the art and/or as set forth herein.

[0703] As a non-limiting example, target DNA hybridizing sequences in crRNAs of a gRNA for use with Cas9s may be identified using a DNA sequence searching algorithm. gRNA design is carried out using custom gRNA design software based on the public tool cas-OFFinder as described in Bae S., Park J., & Kim J.-S. Cas-OFFinder: A fast and versatile algorithm that searches for potential off-target sites of Cas9 RNA-guided endonucleases. Bioinformatics 30, 1473-1475 (2014). This software scores guides after calculating their genome-wide off-target propensity. Typically matches ranging from perfect matches to 7 mismatches are considered for guides ranging in length from 17 to 24. Once the off-target sites are computationally-determined, an aggregate score is calculated for each guide and summarized in a tabular output using a web-interface. In addition to identifying potential target sites adjacent to PAM sequences, the software also identifies all PAM adjacent sequences that differ by 1, 2, 3 or more than 3 nucleotides from the selected target sites. Genomic DNA sequences for a target nucleic acid sequence, e.g., a target gene may be obtained and repeat elements may be screened using publicly available tools, for example, the RepeatMasker program. RepeatMasker searches input DNA sequences for repeated elements and regions of low complexity. The output is a detailed annotation of the repeats present in a given query sequence.

[0704] Following identification, first regions of gRNAs, e.g., crRNAs, are ranked into tiers based on their distance to the target site, their orthogonality and presence of 5′ nucleotides for close matches with relevant PAM sequences (for example, a 5′ G based on identification of close matches in the human genome containing a relevant PAM e.g., NGG PAM for S. pyogenes, NNGRRT or NNGRRV PAM for S. aureus). As used herein, orthogonality refers to the number of sequences in the human genome that contain a minimum number of mismatches to the target sequence. A “high level of orthogonality” or “good orthogonality” may, for example, refer to 20-mer targeting domains that have no identical sequences in the human genome besides the intended target, nor any sequences that contain one or two mismatches in the target sequence. Targeting domains with good orthogonality may be selected to minimize off-target DNA cleavage.

[0705] A gRNA can then be introduced into a cell or embryo as an RNA molecule or a non-RNA nucleic acid molecule, e.g., DNA molecule. In one embodiment, a DNA encoding a gRNA is operably linked to promoter control sequence for expression of the gRNA in a cell or embryo of interest. A RNA coding sequence can be operably linked to a promoter sequence that is recognized by RNA polymerase III (Pol III). Plasmid vectors that can be used to express gRNA include, but are not limited to, px330 vectors and px333 vectors. In some cases, a plasmid vector (e.g., px333 vector) comprises at least two gRNA-encoding DNA sequences. Further, a vector can comprise additional expression control sequences (e.g., enhancer sequences, Kozak sequences, polyadenylation sequences, transcriptional termination sequences, etc.), selectable marker sequences (e.g., GFP or antibiotic resistance genes such as puromycin), origins of replication, and the like. A DNA molecule encoding a gRNA can also be linear. A DNA molecule encoding a gRNA or a guide polynucleotide can also be circular.

[0706] In some embodiments, a reporter system is used for detecting base-editing activity and testing candidate guide polynucleotides. In some embodiments, a reporter system comprises a reporter gene based assay where base editing activity leads to expression of the reporter gene. For example, a reporter system may include a reporter gene comprising a deactivated start codon, e.g., a mutation on the template strand from 3′-TAC-5′ to 3′-CAC-5′. Upon successful deamination of the target C, the corresponding mRNA will be transcribed as 5′-AUG-3′ instead of 5′-GUG-3′, enabling the translation of the reporter gene. Suitable reporter genes will be apparent to those of skill in the art. Non-limiting examples of reporter genes include gene encoding green fluorescence protein (GFP), red fluorescence protein (RFP), luciferase, secreted alkaline phosphatase (SEAP), or any other gene whose expression are detectable and apparent to those skilled in the art. The reporter system can be used to test many different gRNAs, e.g., in order to determine which residue(s) with respect to the target DNA sequence the respective deaminase will target. sgRNAs that target non-template strand can also be tested in order to assess off-target effects of a specific base editing protein, e.g., a Cas9 deaminase fusion protein or complex. In some embodiments, such gRNAs can be designed such that the mutated start codon will not be base-paired with the gRNA. The guide polynucleotides can comprise standard ribonucleotides, modified ribonucleotides (e.g., pseudouridine), ribonucleotide isomers, and/or ribonucleotide analogs. In some embodiments, the guide polynucleotide comprises at least one detectable label. The detectable label can be a fluorophore (e.g., FAM, TMR, Cy3, Cy5, Texas Red, Oregon Green, Alexa Fluors, Halo tags, or suitable fluorescent dye), a detection tag (e.g., biotin, digoxigenin, and the like), quantum dots, or gold particles.

[0707] In some embodiments, a base editor system may comprise multiple guide polynucleotides, e.g., gRNAs. For example, the gRNAs may target to one or more target loci (e.g., at least 1 gRNA, at least 2 gRNA, at least 5 gRNA, at least 10 gRNA, at least 20 gRNA, at least 30 g RNA, at least 50 gRNA) comprised in a base editor system. The multiple gRNA sequences can be tandemly arranged and are preferably separated by a direct repeat.

### Modified Polynucleotides

[0708] To enhance expression, stability, and/or genomic/base editing efficiency, and/or reduce possible toxicity, the base editor-coding sequence (e.g., mRNA) and/or the guide polynucleotide (e.g., gRNA) can be modified to include one or more modified nucleotides and/or chemical modifications, e.g. using pseudo-uridine, 5-Methyl-cytosine, 2′-O-methyl-3′-phosphonoacetate, 2′-O-methyl thioPACE (MSP), 2′-O-methyl-PACE (MP), 2′-fluoro RNA (2′-F-RNA), =constrained ethyl (S-cEt), 2′-O-methyl (‘M’), 2′-O-methyl-3′-phosphorothioate (‘MS’), 2′-O-methyl-3′-thiophosphonoacetate (‘MSP’), 5-methoxyuridine, phosphorothioate, and N1-Methylpseudouridine. Chemically protected gRNAs can enhance stability and editing efficiency in vivo and ex vivo. Methods for using chemically modified mRNAs and guide RNAs are known in the art and described, for example, by Jiang et al., Chemical modifications of adenine base editor mRNA and guide RNA expand its application scope. Nat Commun 11, 1979 (2020). doi.org/10.1038/s41467-020-15892-8, Callum et al., Ni-Methylpseudouridine substitution enhances the performance of synthetic mRNA switches in cells, Nucleic Acids Research, Volume 48, Issue 6, 6 Apr. 2020, Page e35, and Andries et al., Journal of Controlled Release, Volume 217, 10 Nov. 2015, Pages 337-344, each of which is incorporated herein by reference in its entirety.

[0709] In a particular embodiment, the chemical modifications are 2′-O-methyl (2′-OMe) modifications. The modified guide RNAs may improve saCas9 efficacy and also specificity. The effect of an individual modification varies based on the position and combination of chemical modifications used as well as the inter- and intramolecular interactions with other modified nucleotides. By way of example, S-cEt has been used to improve oligonucleotide intramolecular folding.

[0710] In some embodiments, the guide polynucleotide comprises one or more modified nucleotides at the 5′ end and/or the 3′ end of the guide. In some embodiments, the guide polynucleotide comprises two, three, four or more modified nucleosides at the 5′ end and/or the 3′ end of the guide. In some embodiments, the guide polynucleotide comprises two, three, four or more modified nucleosides at the 5′ end and/or the 3′ end of the guide. In some embodiments, the guide polynucleotide comprises four modified nucleosides at the 5′ end and four modified nucleosides at the 3′ end of the guide. In some embodiments, the modified nucleoside comprises a 2′ O-methyl or a phosphorothioate.

[0711] In some embodiments, the guide comprises at least about 50%-75% modified nucleotides. In some embodiments, the guide comprises at least about 85% or more modified nucleotides. In some embodiments, at least about 1-5 nucleotides at the 5′ end of the gRNA are modified and at least about 1-5 nucleotides at the 3′ end of the gRNA are modified. In some embodiments, at least about 3-5 contiguous nucleotides at each of the 5′ and 3′ termini of the gRNA are modified. In some embodiments, at least about 20% of the nucleotides present in a direct repeat or anti-direct repeat are modified. In some embodiments, at least about 50% of the nucleotides present in a direct repeat or anti-direct repeat are modified. In some embodiments, at least about 50-75% of the nucleotides present in a direct repeat or anti-direct repeat are modified. In some embodiments, at least about 100 of the nucleotides present in a direct repeat or anti-direct repeat are modified. In some embodiments, at least about 20% or more of the nucleotides present in a hairpin present in the gRNA scaffold are modified. In some embodiments, at least about 50% or more of the nucleotides present in a hairpin present in the gRNA scaffold are modified. In some embodiments, the guide comprises a variable length spacer. In some embodiments, the guide comprises a 20-40 nucleotide spacer. In some embodiments, the guide comprises a spacer comprising at least about 20-25 nucleotides or at least about 30-35 nucleotides. In some embodiments, the spacer comprises modified nucleotides. In some embodiments, the guide comprises two or more of the following:
[0712] at least about 1-5 nucleotides at the 5′ end of the gRNA are modified and at least about 1-5 nucleotides at the 3′ end of the gRNA are modified;
[0713] at least about 20% of the nucleotides present in a direct repeat or anti-direct repeat are modified;
[0714] at least about 50-75% of the nucleotides present in a direct repeat or anti-direct repeat are modified;
[0715] at least about 20% or more of the nucleotides present in a hairpin present in the gRNA scaffold are modified;
[0716] a variable length spacer; and
[0717] a spacer comprising modified nucleotides.

[0718] In embodiments, the gRNA contains numerous modified nucleotides and/or chemical modifications (“heavy mods”). Such heavy mods can increase base editing ˜2 fold in vivo or in vitro. For such modifications, mN=2′-OMe; Ns=phosphorothioate (PS), where “N” represents the any nucleotide, as would be understood by one having skill in the art. In some cases, a nucleotide (N) may contain two modifications, for example, both a 2′-OMe and a PS modification. For example, a nucleotide with a phosphorothioate and 2′ OMe is denoted as “mNs;” when there are two modifications next to each other, the notation is “mNsmNs. In some embodiments of the modified gRNA, the gRNA comprises one or more chemical modifications selected from the group consisting of 2′-O-methyl (2′-OMe), phosphorothioate (PS), 2′-O-methyl thioPACE (MSP), 2′-O-methyl-PACE (MP), 2′-O-methyl thioPACE (MSP), 2′-fluoro RNA (2′-F-RNA), and constrained ethyl (S-cEt). In embodiments, the gRNA comprises 2′-O-methyl or phosphorothioate modifications. In an embodiment, the gRNA comprises 2′-O-methyl and phosphorothioate modifications. In an embodiment, the modifications increase base editing by at least about 2 fold.

[0719] A guide polynucleotide can comprise one or more modifications to provide a nucleic acid with a new or enhanced feature. A guide polynucleotide can comprise a nucleic acid affinity tag. A guide polynucleotide can comprise synthetic nucleotide, synthetic nucleotide analog, nucleotide derivatives, and/or modified nucleotides.

[0720] In some cases, a gRNA or a guide polynucleotide can comprise modifications. A modification can be made at any location of a gRNA or a guide polynucleotide. More than one modification can be made to a single gRNA or a guide polynucleotide. A gRNA or a guide polynucleotide can undergo quality control after a modification. In some cases, quality control can include PAGE, HPLC, MS, or any combination thereof.

[0721] A modification of a gRNA or a guide polynucleotide can be a substitution, insertion, deletion, chemical modification, physical modification, stabilization, purification, or any combination thereof.

[0722] A gRNA or a guide polynucleotide can also be modified by 5′ adenylate, 5′ guanosine-triphosphate cap, 5′ N7-Methylguanosine-triphosphate cap, 5′ triphosphate cap, 3′ phosphate, 3′ thiophosphate, 5′ phosphate, 5′ thiophosphate, Cis-Syn thymidine dimer, trimers, C12 spacer, C3 spacer, C6 spacer, dSpacer, PC spacer, rSpacer, Spacer 18, Spacer 9, 3′-3′ modifications, 2′-O-methyl thioPACE (MSP), 2′-O-methyl-PACE (MP), and constrained ethyl (S-cEt), 5′-5′ modifications, abasic, acridine, azobenzene, biotin, biotin BB, biotin TEG, cholesteryl TEG, desthiobiotin TEG, DNP TEG, DNP-X, DOTA, dT-Biotin, dual biotin, PC biotin, psoralen C2, psoralen C6, TINA, 3′ DABCYL, black hole quencher 1, black hole quencher 2, DABCYL SE, dT-DABCYL, IRDye QC-1, QSY-21, QSY-35, QSY-7, QSY-9, carboxyl linker, thiol linkers, 2′-deoxyribonucleoside analog purine, 2′-deoxyribonucleoside analog pyrimidine, ribonucleoside analog, 2′-O-methyl ribonucleoside analog, sugar modified analogs, wobble/universal bases, fluorescent dye label, 2′-fluoro RNA, 2′-O-methyl RNA, methylphosphonate, phosphodiester DNA, phosphodiester RNA, phosphothioate DNA, phosphorothioate RNA, UNA, pseudouridine-5′-triphosphate, 5′-methylcytidine-5′-triphosphate, or any combination thereof.

[0723] In some cases, a modification is permanent. In other cases, a modification is transient. In some cases, multiple modifications are made to a gRNA or a guide polynucleotide. A gRNA or a guide polynucleotide modification can alter physiochemical properties of a nucleotide, such as their conformation, polarity, hydrophobicity, chemical reactivity, base-pairing interactions, or any combination thereof.

[0724] A guide polynucleotide can be transferred into a cell by transfecting the cell with an isolated gRNA or a plasmid DNA comprising a sequence coding for the guide RNA and a promoter. A gRNA or a guide polynucleotide can also be transferred into a cell in other way, such as using virus-mediated gene delivery. A gRNA or a guide polynucleotide can be isolated. For example, a gRNA can be transfected in the form of an isolated RNA into a cell or organism. A gRNA can be prepared by in vitro transcription using any in vitro transcription system known in the art. A gRNA can be transferred to a cell in the form of isolated RNA rather than in the form of plasmid comprising encoding sequence for a gRNA.

[0725] A modification can also be a phosphorothioate substitute. In some cases, a natural phosphodiester bond can be susceptible to rapid degradation by cellular nucleases and; a modification of internucleotide linkage using phosphorothioate (PS) bond substitutes can be more stable towards hydrolysis by cellular degradation. A modification can increase stability in a gRNA or a guide polynucleotide. A modification can also enhance biological activity. In some cases, a phosphorothioate enhanced RNA gRNA can inhibit RNase A, RNase T1, calf serum nucleases, or any combinations thereof. These properties can allow the use of PS-RNA gRNAs to be used in applications where exposure to nucleases is of high probability in vivo or in vitro. For example, phosphorothioate (PS) bonds can be introduced between the last 3-5 nucleotides at the 5′- or 3′-end of a gRNA which can inhibit exonuclease degradation. In some cases, phosphorothioate bonds can be added throughout an entire gRNA to reduce attack by endonucleases.

[0726] In some embodiments, the guide RNA is designed such that base editing results in disruption of a splice site (i.e., a splice acceptor (SA) or a splice donor (SD). In some embodiments, the guide RNA is designed such that the base editing results in a premature STOP codon.

### Protospacer Adjacent Motif

[0727] The term “protospacer adjacent motif (PAM)” or PAM-like motif refers to a 2-6 base pair DNA sequence immediately following the DNA sequence targeted by the Cas9 nuclease in the CRISPR bacterial adaptive immune system. In some embodiments, the PAM can be a 5′ PAM (i.e., located upstream of the 5′ end of the protospacer). In other embodiments, the PAM can be a 3′ PAM (i.e., located downstream of the 5′ end of the protospacer). The PAM sequence is essential for target binding, but the exact sequence depends on a type of Cas protein. The PAM sequence can be any PAM sequence known in the art. Suitable PAM sequences include, but are not limited to, NGG, NGA, NGC, NGN, NGT, NGTT, NGCG, NGAG, NGAN, NGNG, NGCN, NGCG, NGTN, NNGRRT, NNNRRT, NNGRR(N), TTTV, TYCV, TYCV, TATV, NNNNGATT, NNAGAAW, or NAAAAC. Y is a pyrimidine; N is any nucleotide base; W is A or T.

[0728] A base editor provided herein can comprise a CRISPR protein-derived domain that is capable of binding a nucleotide sequence that contains a canonical or non-canonical protospacer adjacent motif (PAM) sequence. A PAM site is a nucleotide sequence in proximity to a target polynucleotide sequence. Some aspects of the disclosure provide for base editors comprising all or a portion (e.g., a functional portion) of CRISPR proteins that have different PAM specificities.

[0729] For example, typically Cas9 proteins, such as Cas9 from S. pyogenes (spCas9), require a canonical NGG PAM sequence to bind a particular nucleic acid region, where the “N” in “NGG” is adenine (A), thymine (T), guanine (G), or cytosine (C), and the G is guanine. A PAM can be CRISPR protein-specific and can be different between different base editors comprising different CRISPR protein-derived domains. A PAM can be 5′ or 3′ of a target sequence. A PAM can be upstream or downstream of a target sequence. A PAM can be 1, 2, 3, 4, 5, 6, 7, 8, 9, 10 or more nucleotides in length. Often, a PAM is between 2-6 nucleotides in length.

[0730] In some embodiments, the PAM is an “NRN” PAM where the “N” in “NRN” is adenine (A), thymine (T), guanine (G), or cytosine (C), and the R is adenine (A) or guanine (G); or the PAM is an “NYN” PAM, wherein the “N” in NYN is adenine (A), thymine (T), guanine (G), or cytosine (C), and the Y is cytidine (C) or thymine (T), for example, as described in R. T. Walton et al., 2020, Science, 10.1126/science.aba8853 (2020), the entire contents of which are incorporated herein by reference.

[0731] Several PAM variants are described in Table 6 below.

TABLE 6
Cas9 proteins and corresponding
PAM sequences

| Variant | PAM |
|---|---|
| spCas9 | NGG |
| spCas9-VRQR | NGA |
| spCas9-VRER | NGCG |
| xCas9 (sp) | NGN |
| saCas9 | NNGRRT |
| saCas9-KKH | NNNRRT |
| spCas9-MQKSER | NGCG |
| spCas9-MQKSER | NGCN |
| spCas9-LRKIQK | NGTN |
| spCas9-LRVSQK | NGTN |
| spCas9-LRVSQL | NGTN |
| spCas9-MQKFRAER | NGC |
| Cpf1 | 5′ (TTTV) |
| Spy Mac | 5′-NAA-3′ |

[0732] In some embodiments, the PAM is NGC. In some embodiments, the NGC PAM is recognized by a Cas9 variant. In some embodiments, the NGC PAM Cas9 variant includes one or more amino acid substitutions selected from D1135M, S1136Q, G1218K, E1219F, A1322R, D1332A, R1335E, and T1337R (collectively termed “MQKFRAER”) of spCas9 (SEQ ID No: 197), or a corresponding mutation in another Cas9. In some embodiments, the Cas9 variant contains one or more amino acid substitutions selected from D1135V, G1218R, R1335Q, and T1337R (collectively termed VRQR) of spCas9 (SEQ ID No: 197), or a corresponding mutation in another Cas9. In some embodiments, the Cas9 variant contains one or more amino acid substitutions selected from D1135V, G1218R, R1335E, and T1337R (collectively termed VRER) of spCas9 (SEQ ID No: 197), or a corresponding mutation in another Cas9. In some embodiments, the Cas9 variant contains one or more amino acid substitutions selected from E782K, N968K, and R1015H (collectively termed KHH) of saCas9 (SEQ ID NO: 218). In some embodiments, the Cas9 variant includes one or more amino acid substitutions selected from D1135M, S1136Q, G1218K, E1219S, R1335E, and T1337R (collectively termed “MQKSER”) of spCas9 (SEQ ID No: 197), or a corresponding mutation in another Cas9. In some embodiments, the Cas9 variant includes one or more amino acid substitutions selected from D1135M, S1136Q, G1218K, E1219S, R1335E, and T1337R (collectively termed “MQKSER”) of spCas9 (SEQ ID No: 197), or a corresponding mutation in another Cas9.

[0733] In some embodiments, the PAM is NGT. In some embodiments, the NGT PAM is recognized by a Cas9 variant. In some embodiments, the Cas9 variant is generated through targeted mutations at one or more residues 1335, 1337, 1135, 1136, 1218, and/or 1219 of spCas9 (SEQ ID No: 197), or a corresponding mutation in another Cas9. In some embodiments, the NGT PAM Cas9 variant is created through targeted mutations at one or more residues 1219, 1335, 1337, 1218 of spCas9 (SEQ ID No: 197), or a corresponding mutation in another Cas9. In some embodiments, the NGT PAM Cas9 variant is created through targeted mutations at one or more residues 1135, 1136, 1218, 1219, and 1335 of spCas9 (SEQ ID No: 197, or a corresponding mutation in another Cas9. In some embodiments, the NGT PAM variant is selected from the set of targeted mutations provided in Tables 7A and 7B below.

TABLE 7A
NGT PAM Variant Mutations at residues 1219,
1335, 1337, 1218 of spCas9 (SEQ ID No: 197),
or a corresponding mutation in another Cas9

| Variant | E1219V | R1335Q | T1337 | G1218 |
|---|---|---|---|---|
| 1 | F | V | T | |
| 2 | F | V | R | |
| 3 | F | V | Q | |
| 4 | F | V | L | |
| 5 | F | V | T | R |
| 6 | F | V | R | R |
| 7 | F | V | Q | R |
| 8 | F | V | L | R |
| 9 | L | L | T | |
| 10 | L | L | R | |
| 11 | L | L | Q | |
| 12 | L | L | L | |
| 13 | F | I | T | |
| 14 | F | I | R | |
| 15 | F | I | Q | |
| 16 | F | I | L | |
| 17 | F | G | C | |
| 18 | H | L | N | |
| 19 | F | G | C | A |
| 20 | H | L | N | V |
| 21 | L | A | W | |
| 22 | L | A | F | |
| 23 | L | A | Y | |
| 24 | I | A | W | |
| 25 | I | A | F | |
| 26 | I | A | Y | |

TABLE 7B
NGT PAM Variant Mutations at residues 1135, 1136,
1218, 1219, and 1335 of spCas9 (SEQ ID No: 197),
or a corresponding mutation in another Cas9

| Variant | D1135L | S1136R | G1218S | E1219V | R1335Q |
|---|---|---|---|---|---|
| 27 | G | | | | |
| 28 | V | | | | |
| 29 | I | | | | |
| 30 | | A | | | |
| 31 | | W | | | |
| 32 | | H | | | |
| 33 | | K | | | |
| 34 | | | K | | |
| 35 | | | R | | |
| 36 | | | Q | | |
| 37 | | | T | | |
| 38 | | | N | | |
| 39 | | | | I | |
| 40 | | | | A | |
| 41 | | | | N | |
| 42 | | | | Q | |
| 43 | | | | G | |
| 44 | | | | L | |
| 45 | | | | S | |
| 46 | | | | T | |
| 47 | | | | | L |
| 48 | | | | | I |
| 49 | | | | | V |
| 50 | | | | | N |
| 51 | | | | | S |
| 52 | | | | | T |
| 53 | | | | | F |
| 54 | | | | | Y |
| 55 | N1286Q | I1331F | | | |

[0734] In some embodiments, the NGT PAM Cas9 variant is selected from variant 5, 7, 28, 31, or 36 in Table 7A and Table 7B. In some embodiments, the variants have improved NGT PAM recognition.

[0735] In some embodiments, the NGT PAM Cas9 variants have mutations at residues 1219, 1335, 1337, and/or 1218. In some embodiments, the NGT PAM Cas9 variant is selected with mutations for improved recognition from the variants provided in Table 9 below.

TABLE 8
NGT PAM Variant Mutations at residues 1219,
1335, 1337, and 1218 of spCas9 (SEQ ID No: 197),
or a corresponding mutation in another Cas9

| Variant | E1219V | R1335Q | T1337 | G1218 |
|---|---|---|---|---|
| 1 | F | V | T | |
| 2 | F | V | R | |
| 3 | F | V | Q | |
| 4 | F | V | L | |
| 5 | F | V | T | R |
| 6 | F | V | R | R |
| 7 | F | V | Q | R |
| 8 | F | V | L | R |

[0736] In some embodiments, the NGT PAM is selected from the variants provided in Table 10 below.

TABLE 9
NGT PAM variants, where the amino acid residue locations are referenced to
of spCas9 (SEQ ID No: 197), or a corresponding mutation in another Cas9

| | NGTN | | | | | | | |
|---|---|---|---|---|---|---|---|---|
| | variant | D1135 | S1136 | G1218 | E1219 | A1322R | R1335 | T1337 |
| Variant 1 | LRKIQK | L | R | K | I | — | Q | K |
| Variant 2 | LRSVQK | L | R | S | V | — | Q | K |
| Variant 3 | LRSVQL | L | R | S | V | — | Q | L |
| Variant 4 | LRKIRQK | L | R | K | I | R | Q | K |
| Variant 5 | LRSVRQK | L | R | S | V | R | Q | K |
| Variant 6 | LRSVRQL | L | R | S | V | R | Q | L |

[0737] In some embodiments the NGTN Cas9 variant is variant 1. In some embodiments, the NGTN Cas9 variant is variant 2. In some embodiments, the NGTN variant is variant 3. In some embodiments, the NGTN Cas9 variant is variant 4. In some embodiments, the NGTN Cas9 variant is variant 5. In some embodiments, the NGTN Cas9 variant is variant 6.

[0738] In some embodiments, the Cas9 domain is a Cas9 domain from Streptococcus pyogenes (SpCas9). In some embodiments, the SpCas9 domain is a nuclease active SpCas9, a nuclease inactive SpCas9 (SpCas9d), or a SpCas9 nickase (SpCas9n). In some embodiments, the SpCas9 comprises a D9X mutation, or a corresponding mutation in any of the amino acid sequences provided herein, wherein X is any amino acid except for D. In some embodiments, the SpCas9 comprises a D9A mutation, or a corresponding mutation in any of the amino acid sequences provided herein. In some embodiments, the SpCas9 domain, the SpCas9d domain, or the SpCas9n domain can bind to a nucleic acid sequence having a non-canonical PAM. In some embodiments, the SpCas9 domain, the SpCas9d domain, or the SpCas9n domain can bind to a nucleic acid sequence having an NGG, a NGA, or a NGCG PAM sequence.

[0739] In some embodiments, the SpCas9 domain comprises one or more of a D1135X, a R1335X, and a T1337X mutation, or a corresponding mutation in any of the amino acid sequences provided herein, wherein X is any amino acid. In some embodiments, the SpCas9 domain comprises one or more of a D1135E, R1335Q, and T1337R mutation, or a corresponding mutation in any of the amino acid sequences provided herein. In some embodiments, the SpCas9 domain comprises a D1135E, a R1335Q, and a T1337R mutation, or corresponding mutations in any of the amino acid sequences provided herein. In some embodiments, the SpCas9 domain comprises one or more of a D1135X, a R1335X, and a T1337X mutation, or a corresponding mutation in any of the amino acid sequences provided herein, wherein X is any amino acid. In some embodiments, the SpCas9 domain comprises one or more of a D1135V, a R1335Q, and a T1337R mutation, or a corresponding mutation in any of the amino acid sequences provided herein. In some embodiments, the SpCas9 domain comprises a D1135V, a R1335Q, and a T1337R mutation, or corresponding mutations in any of the amino acid sequences provided herein. In some embodiments, the SpCas9 domain comprises one or more of a D1135X, a G1218X, a R1335X, and a T1337X mutation, or a corresponding mutation in any of the amino acid sequences provided herein, wherein X is any amino acid. In some embodiments, the SpCas9 domain comprises one or more of a D1135V, a G1218R, a R1335Q, and a T1337R mutation, or a corresponding mutation in any of the amino acid sequences provided herein. In some embodiments, the SpCas9 domain comprises a D1135V, a G1218R, a R1335Q, and a T1337R mutation, or corresponding mutations in any of the amino acid sequences provided herein.

[0740] In some examples, a PAM recognized by a CRISPR protein-derived domain of a base editor disclosed herein can be provided to a cell on a separate oligonucleotide to an insert (e.g., an AAV insert) encoding the base editor. In such embodiments, providing PAM on a separate oligonucleotide can allow cleavage of a target sequence that otherwise would not be able to be cleaved, because no adjacent PAM is present on the same polynucleotide as the target sequence.

[0741] In an embodiment, S. pyogenes Cas9 (SpCas9) can be used as a CRISPR endonuclease for genome engineering. However, others can be used. In some embodiments, a different endonuclease can be used to target certain genomic targets. In some embodiments, synthetic SpCas9-derived variants with non-NGG PAM sequences can be used. Additionally, other Cas9 orthologues from various species have been identified and these “non-SpCas9s” can bind a variety of PAM sequences that can also be useful for the present disclosure. For example, the relatively large size of SpCas9 (approximately 4 kb coding sequence) can lead to plasmids carrying the SpCas9 cDNA that cannot be efficiently expressed in a cell. Conversely, the coding sequence for Staphylococcus aureus Cas9 (SaCas9) is approximately 1 kilobase shorter than SpCas9, possibly allowing it to be efficiently expressed in a cell. Similar to SpCas9, the SaCas9 endonuclease is capable of modifying target genes in mammalian cells in vitro and in mice in vivo. In some embodiments, a Cas protein can target a different PAM sequence. In some embodiments, a target gene can be adjacent to a Cas9 PAM, 5′-NGG, for example. In other embodiments, other Cas9 orthologs can have different PAM requirements. For example, other PAMs such as those of S. thermophilus (5′-NNAGAA for CRISPR1 and 5′-NGGNG for CRISPR3) and Neisseria meningitidis (5′-NNNNGATT) can also be found adjacent to a target gene.

[0742] In some embodiments, for a S. pyogenes system, a target gene sequence can precede (i.e., be 5′ to) a 5′-NGG PAM, and a 20-nt guide RNA sequence can base pair with an opposite strand to mediate a Cas9 cleavage adjacent to a PAM. In some embodiments, an adjacent cut can be or can be about 3 base pairs upstream of a PAM. In some embodiments, an adjacent cut can be or can be about 10 base pairs upstream of a PAM. In some embodiments, an adjacent cut can be or can be about 0-20 base pairs upstream of a PAM. For example, an adjacent cut can be next to, 1, 2, 3, 4, 5, 6, 7, 8, 9, 10, 11, 12, 13, 14, 15, 16, 17, 18, 19, 20, 21, 22, 23, 24, 25, 26, 27, 28, 29, or 30 base pairs upstream of a PAM. An adjacent cut can also be downstream of a PAM by 1 to 30 base pairs. The sequences of exemplary SpCas9 proteins capable of binding a PAM sequence follow:

[0743] In some embodiments, engineered SpCas9 variants are capable of recognizing protospacer adjacent motif (PAM) sequences flanked by a 3′ H (non-G PAM) (see Tables 2A-2D). In some embodiments, the SpCas9 variants recognize NRNH PAMs (where R is A or G and H is A, C or T). In some embodiments, the non-G PAM is NRRH, NRTH, or NRCH (see e.g., Miller, S. M., et al. Continuous evolution of SpCas9 variants compatible with non-G PAMs, Nat. Biotechnol. (2020), the contents of which is incorporated herein by reference in its entirety).

[0744] In some embodiments, the Cas9 domain is a recombinant Cas9 domain. In some embodiments, the recombinant Cas9 domain is a SpyMacCas9 domain. In some embodiments, the SpyMacCas9 domain is a nuclease active SpyMacCas9, a nuclease inactive SpyMacCas9 (SpyMacCas9d), or a SpyMacCas9 nickase (SpyMacCas9n). In some embodiments, the SaCas9 domain, the SaCas9d domain, or the SaCas9n domain can bind to a nucleic acid sequence having a non-canonical PAM. In some embodiments, the SpyMacCas9 domain, the SpCas9d domain, or the SpCas9n domain can bind to a nucleic acid sequence having a NAA PAM sequence.

[0745] The sequence of an exemplary Cas9 A homolog of Spy Cas9 in Streptococcus macacae with native 5′-NAAN-3′ PAM specificity is known in the art and described, for example, by Chatterjee, et al., “A Cas9 with PAM recognition for adenine dinucleotides”, Nature Communications, vol. 11, article no. 2474 (2020), and is in the Sequence Listing as SEQ ID NO: 237.

[0746] In some embodiments, a variant Cas9 protein harbors, H840A, P475A, W476A, N477A, D1125A, W1126A, and D1218A mutations relative to a reference Cas9 sequence (e.g., spCas9 (SEQ ID No: 197)), or to a corresponding mutation in another Cas9, such that the polypeptide has a reduced ability to cleave a target DNA or RNA. Such a Cas9 protein has a reduced ability to cleave a target DNA (e.g., a single stranded target DNA) but retains the ability to bind a target DNA (e.g., a single stranded target DNA). As another non-limiting example, in some embodiments, the variant Cas9 protein harbors D10A, H840A, P475A, W476A, N477A, D1125A, W1126A, and D1218A mutations relative to a reference Cas9 sequence (e.g., spCas9 (SEQ ID No: 197)), or to a corresponding mutation in another Cas9, such that the polypeptide has a reduced ability to cleave a target DNA. Such a Cas9 protein has a reduced ability to cleave a target DNA (e.g., a single stranded target DNA) but retains the ability to bind a target DNA (e.g., a single stranded target DNA). In some embodiments, when a variant Cas9 protein harbors W476A and W1126A mutations or when the variant Cas9 protein harbors P475A, W476A, N477A, D1125A, W1126A, and D1218A mutations relative to a reference Cas9 sequence (e.g., spCas9 (SEQ ID No: 197)), or to a corresponding mutation in another Cas9, the variant Cas9 protein does not bind efficiently to a PAM sequence. Thus, in some such cases, when such a variant Cas9 protein is used in a method of binding, the method does not require a PAM sequence. In other words, in some embodiments, when such a variant Cas9 protein is used in a method of binding, the method can include a guide RNA, but the method can be performed in the absence of a PAM sequence (and the specificity of binding is therefore provided by the targeting segment of the guide RNA). Other residues can be mutated to achieve the above effects (i.e., inactivate one or the other nuclease portions). As non-limiting examples, residues D10, G12, G17, E762, H840, N854, N863, H982, H983, A984, D986, and/or A987 can be altered (i.e., substituted) relative to a reference Cas9 sequence (e.g., spCas9 (SEQ ID No: 197)), or to a corresponding mutation in another Cas9. Also, mutations other than alanine substitutions are suitable.

[0747] In some embodiments, a CRISPR protein-derived domain of a base editor comprises all or a portion (e.g., a functional portion) of a Cas9 protein with a canonical PAM sequence (NGG). In other embodiments, a Cas9-derived domain of a base editor can employ a non-canonical PAM sequence. Such sequences have been described in the art and would be apparent to the skilled artisan. For example, Cas9 domains that bind non-canonical PAM sequences have been described in Kleinstiver, B. P., et al., “Engineered CRISPR-Cas9 nucleases with altered PAM specificities” Nature 523, 481-485 (2015); and Kleinstiver, B. P., et al., “Broadening the targeting range of Staphylococcus aureus CRISPR-Cas9 by modifying PAM recognition” Nature Biotechnology 33, 1293-1298 (2015); R. T. Walton et al. “Unconstrained genome targeting with near-PAMless engineered CRISPR-Cas9 variants” Science 10.1126/science.aba8853 (2020); Hu et al. “Evolved Cas9 variants with broad PAM compatibility and high DNA specificity,” Nature, 2018 Apr. 5, 556(7699), 57-63; Miller et al., “Continuous evolution of SpCas9 variants compatible with non-G PAMs” Nat. Biotechnol., 2020 April; 38(4):471-481; the entire contents of each are hereby incorporated by reference.

Fusion Proteins or Complexes Comprising a NapDNAbp and a Cytidine Deaminase and/or Adenosine Deaminase

[0748] Some aspects of the disclosure provide fusion proteins or complexes comprising a Cas9 domain or other nucleic acid programmable DNA binding protein (e.g., Cas12) and one or more cytidine deaminase or adenosine deaminase domains. It should be appreciated that the Cas9 domain may be any of the Cas9 domains or Cas9 proteins (e.g., dCas9 or nCas9) provided herein. In some embodiments, any of the Cas9 domains or Cas9 proteins (e.g., dCas9 or nCas9) provided herein may be fused with any of the cytidine deaminases and/or adenosine deaminases provided herein. The domains of the base editors disclosed herein can be arranged in any order.

[0749] In some embodiments, the fusion protein comprises the following domains A-C, A-D, or A-E:
[0750] NH₂-[A-B—C]—COOH;
[0751] NH₂-[A-B—C-D]-COOH; or
[0752] NH₂-[A-B—C-D-E]-COOH;
   wherein A and C or A, C, and E, each comprises one or more of the following:
[0753] an adenosine deaminase domain or an active fragment thereof,
[0754] a cytidine deaminase domain or an active fragment thereof, and
[0755] wherein B or B and D, each comprises one or more domains having nucleic acid sequence specific binding activity.

[0756] In some embodiments, the fusion protein comprises the following structure:
[0757] NH2-[Aₙ-Bₒ—Cₙ]—COOH;
[0758] NH2-[Aₙ-Bₒ—Cₙ-Dₒ]—COOH; or
[0759] NH2-[Aₙ-Bₒ—Cₚ-Dₒ-E_{q}]—COOH;
   wherein A and C or A, C, and E, each comprises one or more of the following:
[0760] an adenosine deaminase domain or an active fragment thereof,
[0761] a cytidine deaminase domain or an active fragment thereof, and
   wherein n is an integer: 1, 2, 3, 4, or 5, wherein p is an integer: 0, 1, 2, 3, 4, or 5; wherein q is an integer 0, 1, 2, 3, 4, or 5; and wherein B or B and D each comprises a domain having nucleic acid sequence specific binding activity; and wherein o is an integer: 1, 2, 3, 4, or 5.

[0762] For example, and without limitation, in some embodiments, the fusion protein comprises the structure:
[0763] NH2-[adenosine deaminase]-[Cas9 domain]-COOH;
[0764] NH2-[Cas9 domain]-[adenosine deaminase]-COOH;
[0765] NH2-[cytidine deaminase]-[Cas9 domain]-COOH;
[0766] NH2-[Cas9 domain]-[cytidine deaminase]-COOH;
[0767] NH2-[cytidine deaminase]-[Cas9 domain]-[adenosine deaminase]-COOH;
[0768] NH2-[adenosine deaminase]-[Cas9 domain]-[cytidine deaminase]-COOH;
[0769] NH2-[adenosine deaminase]-[cytidine deaminase]-[Cas9 domain]-COOH;
[0770] NH2-[cytidine deaminase]-[adenosine deaminase]-[Cas9 domain]-COOH;
[0771] NH2-[Cas9 domain]-[adenosine deaminase]-[cytidine deaminase]-COOH; or
[0772] NH2-[Cas9 domain]-[cytidine deaminase]-[adenosine deaminase]-COOH.

[0773] In some embodiments, any of the Cas12 domains or Cas12 proteins provided herein may be fused with any of the cytidine or adenosine deaminases provided herein. For example, and without limitation, in some embodiments, the fusion protein comprises the structure:
[0774] NH2-[adenosine deaminase]-[Cas12 domain]-COOH;
[0775] NH2-[Cas12 domain]-[adenosine deaminase]-COOH;
[0776] NH2-[cytidine deaminase]-[Cas12 domain]-COOH;
[0777] NH2-[Cas12 domain]-[cytidine deaminase]-COOH;
[0778] NH2-[cytidine deaminase]-[Cas12 domain]-[adenosine deaminase]-COOH;
[0779] NH2-[adenosine deaminase]-[Cas12 domain]-[cytidine deaminase]-COOH;
[0780] NH2-[adenosine deaminase]-[cytidine deaminase]-[Cas12 domain]-COOH;
[0781] NH2-[cytidine deaminase]-[adenosine deaminase]-[Cas12 domain]-COOH;
[0782] NH2-[Cas12 domain]-[adenosine deaminase]-[cytidine deaminase]-COOH; or
[0783] NH2-[Cas12 domain]-[cytidine deaminase]-[adenosine deaminase]-COOH.

[0784] In some embodiments, the adenosine deaminase is a TadA*8. Exemplary fusion protein structures include the following:
[0785] NH2-[TadA*8]-[Cas9 domain]-COOH;
[0786] NH2-[Cas9 domain]-[TadA*8]—COOH;
[0787] NH2-[TadA*8]-[Cas12 domain]-COOH; or
[0788] NH2-[Cas12 domain]-[TadA*8]—COOH.

[0789] In some embodiments, the adenosine deaminase of the fusion protein or complex comprises a TadA*8 and a cytidine deaminase and/or an adenosine deaminase. In some embodiments, the TadA*8 is TadA*8.1, TadA*8.2, TadA*8.3, TadA*8.4, TadA*8.5, TadA*8.6, TadA*8.7, TadA*8.8, TadA*8.9, TadA*8.10, TadA*8.11, TadA*8.12, TadA*8.13, TadA*8.14, TadA*8.15, TadA*8.16, TadA*8.17, TadA*8.18, TadA*8.19, TadA*8.20, TadA*8.21, TadA*8.22, TadA*8.23, or TadA*8.24.

[0790] Exemplary fusion protein structures include the following:
[0791] NH2-[TadA*8]-[Cas9/Cas12]-[adenosine deaminase]-COOH;
[0792] NH2-[adenosine deaminase]-[Cas9/Cas12]-[TadA*8]—COOH;
[0793] NH2-[TadA*8]-[Cas9/Cas12]-[cytidine deaminase]-COOH; or
[0794] NH2-[cytidine deaminase]-[Cas9/Cas12]-[TadA*8]—COOH.

[0795] In some embodiments, the adenosine deaminase of the fusion protein comprises a TadA*9 and a cytidine deaminase and/or an adenosine deaminase. Exemplary fusion protein structures include the following:
[0796] NH2-[TadA*9]-[Cas9/Cas12]-[adenosine deaminase]-COOH;
[0797] NH2-[adenosine deaminase]-[Cas9/Cas12]-[TadA*9]—COOH;
[0798] NH2-[TadA*9]-[Cas9/Cas12]-[cytidine deaminase]-COOH; or
[0799] NH2-[cytidine deaminase]-[Cas9/Cas12]-[TadA*9]—COOH.

[0800] In some embodiments, the fusion protein comprises a deaminase flanked by an N-terminal fragment and a C-terminal fragment of a Cas9 or a Cas12 polypeptide. In some embodiments, the fusion protein comprises a cytidine deaminase flanked by an N-terminal fragment and a C-terminal fragment of a Cas9 or a Cas12 polypeptide. In some embodiments, the fusion protein comprises an adenosine deaminase flanked by an N-terminal fragment and a C-terminal fragment of a Cas9 or Cas 12 polypeptide.

[0801] In some embodiments, the fusion proteins or complexes comprising a cytidine deaminase or adenosine deaminase and a napDNAbp (e.g., Cas9 or Cas12 domain) do not include a linker sequence. In some embodiments, a linker is present between the cytidine or adenosine deaminase and the napDNAbp. In some embodiments, the “-” used in the general architecture above indicates the optional presence of a linker. In some embodiments, cytidine or adenosine deaminase and the napDNAbp are fused via any of the linkers provided herein. For example, in some embodiments the cytidine or adenosine deaminase and the napDNAbp are fused via any of the linkers provided herein.

[0802] It should be appreciated that the fusion proteins or complexes of the present disclosure may comprise one or more additional features. For example, in some embodiments, the fusion protein or complex may comprise inhibitors, cytoplasmic localization sequences, export sequences, such as nuclear export sequences, or other localization sequences, as well as sequence tags that are useful for solubilization, purification, or detection of the fusion proteins or complexes. Suitable protein tags provided herein include, but are not limited to, biotin carboxylase carrier protein (BCCP) tags, myc-tags, calmodulin-tags, FLAG-tags, hemagglutinin (HA)-tags, polyhistidine tags, also referred to as histidine tags or His-tags, maltose binding protein (MBP)-tags, nus-tags, glutathione-S-transferase (GST)-tags, green fluorescent protein (GFP)-tags, thioredoxin-tags, S-tags, Softags (e.g., Softag 1, Softag 3), strep-tags, biotin ligase tags, FlAsH tags, V5 tags, and SBP-tags. Additional suitable sequences will be apparent to those of skill in the art. In some embodiments, the fusion protein or complex comprises one or more His tags.

[0803] Exemplary, yet nonlimiting, fusion proteins are described in International PCT Application Nos. PCT/US2017/045381, PCT/US2019/044935, and PCT/US2020/016288, each of which is incorporated herein by reference for its entirety.

### Fusion Proteins or Complexes Comprising a Nuclear Localization Sequence (NLS)

[0804] In some embodiments, the fusion proteins or complexes provided herein further comprise one or more (e.g., 2, 3, 4, 5) nuclear targeting sequences, for example a nuclear localization sequence (NLS). In one embodiment, a bipartite NLS is used. In some embodiments, a NLS comprises an amino acid sequence that facilitates the importation of a protein, that comprises an NLS, into the cell nucleus (e.g., by nuclear transport). In some embodiments, the NLS is fused to the N-terminus or the C-terminus of the fusion protein. In some embodiments, the NLS is fused to the C-terminus or N-terminus of an nCas9 domain or a dCas9 domain. In some embodiments, the NLS is fused to the N-terminus or C-terminus of the Cas12 domain. In some embodiments, the NLS is fused to the N-terminus or C-terminus of the cytidine or adenosine deaminase. In some embodiments, the NLS is fused to the fusion protein via one or more linkers. In some embodiments, the NLS is fused to the fusion protein without a linker. In some embodiments, the NLS comprises an amino acid sequence of any one of the NLS sequences provided or referenced herein. Additional nuclear localization sequences are known in the art and would be apparent to the skilled artisan. For example, NLS sequences are described in Plank et al., PCT/EP2000/011690, the contents of which are incorporated herein by reference for their disclosure of exemplary nuclear localization sequences. In some embodiments, an NLS comprises the amino acid sequence

(SEQ ID NO: 328)
PKKKRKVEGADKRTADGSEFESPKKKRKV,
(SEQ ID NO: 190)
KRTADGSEFESPKKKRKV,
(SEQ ID NO: 191)
KRPAATKKAGQAKKKK,
(SEQ ID NO: 192)
KKTELQTTNAENKTKKL,
(SEQ ID NO: 193)
KRGINDRNFWRGENGRKTR,
(SEQ ID NO: 329)
RKSGKIAAIVVKRPRKPKKKRKV,
or
(SEQ ID NO: 196)
MDSLLMNRRKFLYQFKNVRWAKGRRETYLC.

[0805] In some embodiments, the fusion proteins or complexes comprising a cytidine or adenosine deaminase, a Cas9 domain, and an NLS do not comprise a linker sequence. In some embodiments, linker sequences between one or more of the domains or proteins (e.g., cytidine or adenosine deaminase, Cas9 domain or NLS) are present. In some embodiments, a linker is present between the cytidine deaminase and adenosine deaminase domains and the napDNAbp. In some embodiments, the “-” used in the general architecture below indicates the optional presence of a linker. In some embodiments, the cytidine deaminase and adenosine deaminase and the napDNAbp are fused via any of the linkers provided herein. For example, in some embodiments the cytidine deaminase and adenosine deaminase and the napDNAbp are fused via any of the linkers provided herein.

[0806] In some embodiments, the general architecture of exemplary napDNAbp (e.g., Cas9 or Cas12) fusion proteins with a cytidine or adenosine deaminase and a napDNAbp (e.g. Cas9 or Cas12) domain comprises any one of the following structures, where NLS is a nuclear localization sequence (e.g., any NLS provided herein), NH2 is the N-terminus of the fusion protein, and COOH is the C-terminus of the fusion protein:
[0807] NH₂-NLS-[cytidine deaminase]-[napDNAbp domain]-COOH;
[0808] NH₂-NLS [napDNAbp domain]-[cytidine deaminase]-COOH;
[0809] NH₂-[cytidine deaminase]-[napDNAbp domain]-NLS—COOH;
[0810] NH₂-[napDNAbp domain]-[cytidine deaminase]-NLS—COOH;
[0811] NH₂-NLS-[adenosine deaminase]-[napDNAbp domain]-COOH;
[0812] NH₂-NLS [napDNAbp domain]-[adenosine deaminase]-COOH;
[0813] NH₂-[adenosine deaminase]-[napDNAbp domain]-NLS—COOH;
[0814] NH₂-[napDNAbp domain]-[adenosine deaminase]-NLS—COOH;
[0815] NH₂-NLS-[cytidine deaminase]-[napDNAbp domain]-[adenosine deaminase]-COOH;
[0816] NH₂-NLS-[adenosine deaminase]-[napDNAbp domain]-[cytidine deaminase]-COOH;
[0817] NH₂-NLS-[adenosine deaminase] [cytidine deaminase]-[napDNAbp domain]-COOH;
[0818] NH₂-NLS-[cytidine deaminase]-[adenosine deaminase]-[napDNAbp domain]-COOH;
[0819] NH₂-NLS-[napDNAbp domain]-[adenosine deaminase]-[cytidine deaminase]-COOH;
[0820] NH₂-NLS-[napDNAbp domain]-[cytidine deaminase]-[adenosine deaminase]-COOH;
[0821] NH₂-[cytidine deaminase]-[napDNAbp domain]-[adenosine deaminase]-NLS—COOH;
[0822] NH₂-[adenosine deaminase]-[napDNAbp domain]-[cytidine deaminase]-NLS—COOH;
[0823] NH₂-[adenosine deaminase] [cytidine deaminase]-[napDNAbp domain]-NLS—COOH;
[0824] NH₂-[cytidine deaminase]-[adenosine deaminase]-[napDNAbp domain]-NLS—COOH;
[0825] NH₂-[napDNAbp domain]-[adenosine deaminase]-[cytidine deaminase]-NLS—COOH; or
[0826] NH₂-[napDNAbp domain]-[cytidine deaminase]-[adenosine deaminase]-NLS—COOH.

[0827] In some embodiments, the NLS is present in a linker or the NLS is flanked by linkers, for example described herein. A bipartite NLS comprises two basic amino acid clusters, which are separated by a relatively short spacer sequence (hence bipartite—2 parts, while monopartite NLSs are not). The NLS of nucleoplasmin, KR [PAATKKAGQA]KKKK (SEQ ID NO: 191), is the prototype of the ubiquitous bipartite signal: two clusters of basic amino acids, separated by a spacer of about 10 amino acids. The sequence of an exemplary bipartite NLS follows:

(SEQ ID NO: 328)
PKKKRKVEGADKRTADGSEFESPKKKRKV

[0828] A vector that encodes a CRISPR enzyme comprising one or more nuclear localization sequences (NLSs) can be used. For example, there can be or be about 1, 2, 3, 4, 5, 6, 7, 8, 9, 10 NLSs used. A CRISPR enzyme can comprise the NLSs at or near the amino-terminus, about or more than about 1, 2, 3, 4, 5, 6, 7, 8, 9, 10 NLSs at or near the carboxy-terminus, or any combination thereof (e.g., one or more NLS at the amino-terminus and one or more NLS at the carboxy terminus). When more than one NLS is present, each can be selected independently of others, such that a single NLS can be present in more than one copy and/or in combination with one or more other NLSs present in one or more copies.

[0829] CRISPR enzymes used in the methods can comprise about 6 NLSs. An NLS is considered near the N- or C-terminus when the nearest amino acid to the NLS is within about 50 amino acids along a polypeptide chain from the N- or C-terminus, e.g., within 1, 2, 3, 4, 5, 10, 15, 20, 25, 30, 40, or 50 amino acids.

### Additional Domains

[0830] A base editor described herein can include any domain which helps to facilitate the nucleobase editing, modification or altering of a nucleobase of a polynucleotide. In some embodiments, a base editor comprises a polynucleotide programmable nucleotide binding domain (e.g., Cas9), a nucleobase editing domain (e.g., deaminase domain), and one or more additional domains. In some embodiments, the additional domain can facilitate enzymatic or catalytic functions of the base editor, binding functions of the base editor, or be inhibitors of cellular machinery (e.g., enzymes) that could interfere with the desired base editing result. In some embodiments, a base editor comprises a nuclease, a nickase, a recombinase, a deaminase, a methyltransferase, a methylase, an acetylase, an acetyltransferase, a transcriptional activator, or a transcriptional repressor domain.

[0831] In some embodiments, a base editor comprises a uracil glycosylase inhibitor (UGI) domain. In some embodiments, cellular DNA repair response to the presence of U: G heteroduplex DNA can be responsible for a decrease in nucleobase editing efficiency in cells. In such embodiments, uracil DNA glycosylase (UDG) can catalyze removal of U from DNA in cells, which can initiate base excision repair (BER), mostly resulting in reversion of the U:G pair to a C:G pair. In such embodiments, BER can be inhibited in base editors comprising one or more domains that bind the single strand, block the edited base, inhibit UGI, inhibit BER, protect the edited base, and/or promote repairing of the non-edited strand. Thus, this disclosure contemplates a base editor fusion protein or complex comprising a UGI domain and/or a uracil stabilizing protein (USP) domain.

[0832] In some embodiments, a base editor comprises as a domain all or a portion (e.g., a functional portion) of a double-strand break (DSB) binding protein. For example, a DSB binding protein can include a Gam protein of bacteriophage Mu that can bind to the ends of DSBs and can protect them from degradation. See Komor, A. C., et al., “Improved base excision repair inhibition and bacteriophage Mu Gam protein yields C:G-to-T:A base editors with higher efficiency and product purity” Science Advances 3:eaao4774 (2017), the entire content of which is hereby incorporated by reference.

[0833] Additionally, in some embodiments, a Gam protein can be fused to an N terminus of a base editor. In some embodiments, a Gam protein can be fused to a C terminus of a base editor. The Gam protein of bacteriophage Mu can bind to the ends of double strand breaks (DSBs) and protect them from degradation. In some embodiments, using Gam to bind the free ends of DSB can reduce indel formation during the process of base editing. In some embodiments, 174-residue Gam protein is fused to the N terminus of the base editors. See Komor, A. C., et al., “Improved base excision repair inhibition and bacteriophage Mu Gam protein yields C:G-to-T:A base editors with higher efficiency and product purity” Science Advances 3:eaao4774 (2017). In some embodiments, a mutation or mutations can change the length of a base editor domain relative to a wild type domain. For example, a deletion of at least one amino acid in at least one domain can reduce the length of the base editor. In another case, a mutation or mutations do not change the length of a domain relative to a wild type domain. For example, substitutions in any domain does not change the length of the base editor.

[0834] Non-limiting examples of such base editors, where the length of all the domains is the same as the wild type domains, can include:
[0835] NH2-[nucleobase editing domain]-Linker1-[APOBEC1]-Linker2-[nucleobase editing domain]-COOH;
[0836] NH2-[nucleobase editing domain]-Linker1-[APOBEC1]-[nucleobase editing domain]-COOH;
[0837] NH2-[nucleobase editing domain]-[APOBEC1]-Linker2-[nucleobase editing domain]-COOH;
[0838] NH2-[nucleobase editing domain]-[APOBEC1]-[nucleobase editing domain]-COOH;
[0839] NH2-[nucleobase editing domain]-Linker1-[APOBEC1]-Linker2-[nucleobase editing domain]-[UGI]—COOH;
[0840] NH2-[nucleobase editing domain]-Linker1-[APOBEC1]-[nucleobase editing domain]-[UGI]—COOH;
[0841] NH2-[nucleobase editing domain]-[APOBEC1]-Linker2-[nucleobase editing domain]-[UGI]—COOH;
[0842] NH2-[nucleobase editing domain]-[APOBEC1]-[nucleobase editing domain]-[UGI]—COOH;
[0843] NH2-[UGI]-[nucleobase editing domain]-Linker1-[APOBEC1]-Linker2-[nucleobase editing domain]-COOH;
[0844] NH2-[UGI]-[nucleobase editing domain]-Linker1-[APOBEC1]-[nucleobase editing domain]-COOH;
[0845] NH2-[UGI]-[nucleobase editing domain]-[APOBEC1]-Linker2-[nucleobase editing domain]-COOH; or
[0846] NH2-[UGI]-[nucleobase editing domain]-[APOBEC1]-[nucleobase editing domain]-COOH.

### Base Editor System

[0847] Provided herein are systems, compositions, and methods for editing a nucleobase using a base editor system. In some embodiments, the base editor system comprises (1) a base editor (BE) comprising a polynucleotide programmable nucleotide binding domain and a nucleobase editing domain (e.g., a deaminase domain) for editing the nucleobase; and (2) a guide polynucleotide (e.g., guide RNA) in conjunction with the polynucleotide programmable nucleotide binding domain. In some embodiments, the base editor system is a cytidine base editor (CBE) or an adenosine base editor (ABE). In some embodiments, the polynucleotide programmable nucleotide binding domain is a polynucleotide programmable DNA or RNA binding domain. In some embodiments, the nucleobase editing domain is a deaminase domain. In some embodiments, a deaminase domain can be a cytidine deaminase or an cytosine deaminase. In some embodiments, a deaminase domain can be an adenine deaminase or an adenosine deaminase. In some embodiments, the adenosine base editor can deaminate adenine in DNA. In some embodiments, the base editor is capable of deaminating a cytidine in DNA.

[0848] In some embodiments, a base editing system as provided herein provides a new approach to genome editing that uses a fusion protein or complex containing a catalytically defective Streptococcus pyogenes Cas9, a deaminase (e.g., cytidine or adenosine deaminase), and an inhibitor of base excision repair to induce programmable, single nucleotide (C→T or A→G) changes in DNA without generating double-strand DNA breaks, without requiring a donor DNA template, and without inducing an excess of stochastic insertions and deletions.

[0849] Details of nucleobase editing proteins are described in International PCT Application Nos. PCT/US2017/045381 (WO2018/027078) and PCT/US2016/058344 (WO2017/070632), each of which is incorporated herein by reference for its entirety. Also see Komor, A. C., et al., “Programmable editing of a target base in genomic DNA without double-stranded DNA cleavage” Nature 533, 420-424 (2016); Gaudelli, N. M., et al., “Programmable base editing of A·T to G·C in genomic DNA without DNA cleavage” Nature 551, 464-471 (2017); and Komor, A. C., et al., “Improved base excision repair inhibition and bacteriophage Mu Gam protein yields C:G-to-T:A base editors with higher efficiency and product purity” Science Advances 3:eaao4774 (2017), the entire contents of which are hereby incorporated by reference.

[0850] Use of the base editor system provided herein comprises the steps of: (a) contacting a target nucleotide sequence of a polynucleotide (e.g., double- or single stranded DNA or RNA) of a subject with a base editor system comprising a nucleobase editor (e.g., an adenosine base editor or a cytidine base editor) and a guide polynucleic acid (e.g., gRNA), wherein the target nucleotide sequence comprises a targeted nucleobase pair; (b) inducing strand separation of said target region; (c) converting a first nucleobase of said target nucleobase pair in a single strand of the target region to a second nucleobase; and (d) cutting no more than one strand of said target region, where a third nucleobase complementary to the first nucleobase base is replaced by a fourth nucleobase complementary to the second nucleobase. It should be appreciated that in some embodiments, step (b) is omitted. In some embodiments, said targeted nucleobase pair is a plurality of nucleobase pairs in one or more genes. In some embodiments, the base editor system provided herein is capable of multiplex editing of a plurality of nucleobase pairs in one or more genes. In some embodiments, the plurality of nucleobase pairs is located in the same gene. In some embodiments, the plurality of nucleobase pairs is located in one or more genes, wherein at least one gene is located in a different locus.

[0851] In some embodiments, the cut single strand (nicked strand) is hybridized to the guide nucleic acid. In some embodiments, the cut single strand is opposite to the strand comprising the first nucleobase. In some embodiments, the base editor comprises a Cas9 domain. In some embodiments, the first base is adenine, and the second base is not a G, C, A, or T. In some embodiments, the second base is inosine.

[0852] In some embodiments, a single guide polynucleotide may be utilized to target a deaminase to a target nucleic acid sequence. In some embodiments, a single pair of guide polynucleotides may be utilized to target different deaminases to a target nucleic acid sequence.

[0853] The components of a base editor system (e.g., a deaminase domain, a guide RNA, and/or a polynucleotide programmable nucleotide binding domain) may be associated with each other covalently or non-covalently. For example, in some embodiments, the deaminase domain can be targeted to a target nucleotide sequence by a polynucleotide programmable nucleotide binding domain, optionally where the polynucleotide programmable nucleotide binding domain is complexed with a polynucleotide (e.g., a guide RNA). In some embodiments, a polynucleotide programmable nucleotide binding domain can be fused or linked to a deaminase domain. In some embodiments, a polynucleotide programmable nucleotide binding domain can target a deaminase domain to a target nucleotide sequence by non-covalently interacting with or associating with the deaminase domain. For example, in some embodiments, the nucleobase editing component (e.g., the deaminase component) comprises an additional heterologous portion or domain that is capable of interacting with, associating with, or capable of forming a complex with a corresponding heterologous portion, antigen, or domain that is part of a polynucleotide programmable nucleotide binding domain and/or a guide polynucleotide (e.g., a guide RNA) complexed therewith. In some embodiments, the polynucleotide programmable nucleotide binding domain, and/or a guide polynucleotide (e.g., a guide RNA) complexed therewith, comprises an additional heterologous portion or domain that is capable of interacting with, associating with, or capable of forming a complex with a corresponding heterologous portion, antigen, or domain that is part of a nucleobase editing domain (e.g., the deaminase component). In some embodiments, the additional heterologous portion may be capable of binding to, interacting with, associating with, or forming a complex with a polypeptide. In some embodiments, the additional heterologous portion may be capable of binding to, interacting with, associating with, or forming a complex with a polynucleotide. In some embodiments, the additional heterologous portion may be capable of binding to a guide polynucleotide. In some embodiments, the additional heterologous portion may be capable of binding to a polypeptide linker. In some embodiments, the additional heterologous portion is capable of binding to a polynucleotide linker. An additional heterologous portion may be a protein domain. In some embodiments, an additional heterologous portion comprises a polypeptide, such as a 22 amino acid RNA-binding domain of the lambda bacteriophage antiterminator protein N (N22p), a 2G12 IgG homodimer domain, an ABI, an antibody (e.g. an antibody that binds a component of the base editor system or a heterologous portion thereof) or fragment thereof (e.g. heavy chain domain 2 (CH2) of IgM (MHD2) or IgE (EHD2), an immunoglobulin Fc region, a heavy chain domain 3 (CH3) of IgG or IgA, a heavy chain domain 4 (CH4) of IgM or IgE, an Fab, an Fab2, miniantibodies, and/or ZIP antibodies), a barnase-barstar dimer domain, a Bcl-xL domain, a Calcineurin A (CAN) domain, a Cardiac phospholamban transmembrane pentamer domain, a collagen domain, a Com RNA binding protein domain (e.g. SfMu Com coat protein domain, and SfMu Com binding protein domain), a Cyclophilin-Fas fusion protein (CyP-Fas) domain, a Fab domain, an Fc domain, a fibritin foldon domain, an FK506 binding protein (FKBP) domain, an FKBP binding domain (FRB) domain of mTOR, a foldon domain, a fragment X domain, a GAI domain, a GID1 domain, a Glycophorin A transmembrane domain, a GyrB domain, a Halo tag, an HIV Gp41 trimerisation domain, an HPV45 oncoprotein E7 C-terminal dimer domain, a hydrophobic polypeptide, a K Homology (KH) domain, a Ku protein domain (e.g., a Ku heterodimer), a leucine zipper, a LOV domain, a mitochondrial antiviral-signaling protein CARD filament domain, an MS2 coat protein domain (MCP), a non-natural RNA aptamer ligand that binds a corresponding RNA motif/aptamer, a parathyroid hormone dimerization domain, a PP7 coat protein (PCP) domain, a PSD95-Dlgl-zo-1 (PDZ) domain, a PYL domain, a SNAP tag, a SpyCatcher moiety, a SpyTag moiety, a streptavidin domain, a streptavidin-binding protein domain, a streptavidin binding protein (SBP) domain, a telomerase Sm7 protein domain (e.g. Sm7 homoheptamer or a monomeric Sm-like protein), and/or fragments thereof. In embodiments, an additional heterologous portion comprises a polynucleotide (e.g., an RNA motif), such as an MS2 phage operator stem-loop (e.g. an MS2, an MS2 C-5 mutant, or an MS2 F-5 mutant), a non-natural RNA motif, a PP7 opterator stem-loop, an SfMu phate Com stem-loop, a steril alpha motif, a telomerase Ku binding motif, a telomerase Sm7 binding motif, and/or fragments thereof. Non-limiting examples of additional heterologous portions include polypeptides with at least about 85% sequence identity to any one or more of SEQ ID NOs: 380, 382, 384, 386-388, or fragments thereof. Non-limiting examples of additional heterologous portions include polynucleotides with at least about 85% sequence identity to any one or more of SEQ ID NOs: 379, 381, 383, 385, or fragments thereof.

[0854] A base editor system may further comprise a guide polynucleotide component. It should be appreciated that components of the base editor system may be associated with each other via covalent bonds, noncovalent interactions, or any combination of associations and interactions thereof. In some embodiments, a deaminase domain can be targeted to a target nucleotide sequence by a guide polynucleotide. For example, in some embodiments, the nucleobase editing component of the base editor system (e.g., the deaminase component) comprises an additional heterologous portion or domain (e.g., polynucleotide binding domain such as an RNA or DNA binding protein) that is capable of interacting with, associating with, or capable of forming a complex with a heterologous portion or segment (e.g., a polynucleotide motif), or antigen of a guide polynucleotide. In some embodiments, the additional heterologous portion or domain (e.g., polynucleotide binding domain such as an RNA or DNA binding protein) can be fused or linked to the deaminase domain. In some embodiments, the additional heterologous portion may be capable of binding to, interacting with, associating with, or forming a complex with a polypeptide. In some embodiments, the additional heterologous portion may be capable of binding to, interacting with, associating with, or forming a complex with a polynucleotide. In some embodiments, the additional heterologous portion may be capable of binding to a guide polynucleotide. In some embodiments, the additional heterologous portion may be capable of binding to a polypeptide linker. In some embodiments, the additional heterologous portion may be capable of binding to a polynucleotide linker. An additional heterologous portion may be a protein domain. In some embodiments, an additional heterologous portion comprises a polypeptide, such as a 22 amino acid RNA-binding domain of the lambda bacteriophage antiterminator protein N (N22p), a 2G12 IgG homodimer domain, an ABI, an antibody (e.g. an antibody that binds a component of the base editor system or a heterologous portion thereof) or fragment thereof (e.g. heavy chain domain 2 (CH2) of IgM (MHD2) or IgE (EHD2), an immunoglobulin Fc region, a heavy chain domain 3 (CH3) of IgG or IgA, a heavy chain domain 4 (CH4) of IgM or IgE, an Fab, an Fab2, miniantibodies, and/or ZIP antibodies), a barnase-barstar dimer domain, a Bcl-xL domain, a Calcineurin A (CAN) domain, a Cardiac phospholamban transmembrane pentamer domain, a collagen domain, a Com RNA binding protein domain (e.g. SfMu Com coat protein domain, and SfMu Com binding protein domain), a Cyclophilin-Fas fusion protein (CyP-Fas) domain, a Fab domain, an Fc domain, a fibritin foldon domain, an FK506 binding protein (FKBP) domain, an FKBP binding domain (FRB) domain of mTOR, a foldon domain, a fragment X domain, a GAI domain, a GID1 domain, a Glycophorin A transmembrane domain, a GyrB domain, a Halo tag, an HIV Gp41 trimerisation domain, an HPV45 oncoprotein E7 C-terminal dimer domain, a hydrophobic polypeptide, a K Homology (KH) domain, a Ku protein domain (e.g., a Ku heterodimer), a leucine zipper, a LOV domain, a mitochondrial antiviral-signaling protein CARD filament domain, an MS2 coat protein domain (MCP), a non-natural RNA aptamer ligand that binds a corresponding RNA motif/aptamer, a parathyroid hormone dimerization domain, a PP7 coat protein (PCP) domain, a PSD95-Dlgl-zo-1 (PDZ) domain, a PYL domain, a SNAP tag, a SpyCatcher moiety, a SpyTag moiety, a streptavidin domain, a streptavidin-binding protein domain, a streptavidin binding protein (SBP) domain, a telomerase Sm7 protein domain (e.g. Sm7 homoheptamer or a monomeric Sm-like protein), and/or fragments thereof. In embodiments, an additional heterologous portion comprises a polynucleotide (e.g., an RNA motif), such as an MS2 phage operator stem-loop (e.g. an MS2, an MS2 C-5 mutant, or an MS2 F-5 mutant), a non-natural RNA motif, a PP7 opterator stem-loop, an SfMu phate Com stem-loop, a steril alpha motif, a telomerase Ku binding motif, a telomerase Sm7 binding motif, and/or fragments thereof. Non-limiting examples of additional heterologous portions include polypeptides with at least about 85% sequence identity to any one or more of SEQ ID NOs: 380, 382, 384, 386-388, or fragments thereof. Non-limiting examples of additional heterologous portions include polynucleotides with at least about 85% sequence identity to any one or more of SEQ ID NOs: 379, 381, 383, 385, or fragments thereof.

[0855] In some embodiments, a base editor system can further comprise an inhibitor of base excision repair (BER) component. It should be appreciated that components of the base editor system may be associated with each other via covalent bonds, noncovalent interactions, or any combination of associations and interactions thereof. The inhibitor of BER component may comprise a base excision repair inhibitor. In some embodiments, the inhibitor of base excision repair can be a uracil DNA glycosylase inhibitor (UGI). In some embodiments, the agent inhibiting the uracil-excision repair system is a uracil stabilizing protein (USP). In some embodiments, the inhibitor of base excision repair can be an inosine base excision repair inhibitor. In some embodiments, the inhibitor of base excision repair can be targeted to the target nucleotide sequence by the polynucleotide programmable nucleotide binding domain, optionally where the polynucleotide programmable nucleotide binding domain is complexed with a polynucleotide (e.g., a guide RNA). In some embodiments, a polynucleotide programmable nucleotide binding domain can be fused or linked to an inhibitor of base excision repair. In some embodiments, a polynucleotide programmable nucleotide binding domain can be fused or linked to a deaminase domain and an inhibitor of base excision repair. In some embodiments, a polynucleotide programmable nucleotide binding domain can target an inhibitor of base excision repair to a target nucleotide sequence by non-covalently interacting with or associating with the inhibitor of base excision repair. For example, in some embodiments, the inhibitor of base excision repair component comprises an additional heterologous portion or domain that is capable of interacting with, associating with, or capable of forming a complex with a corresponding additional heterologous portion, antigen, or domain that is part of a polynucleotide programmable nucleotide binding domain. In some embodiments, the polynucleotide programming nucleotide binding domain component, and/or a guide polynucleotide (e.g., a guide RNA) complexed therewith, comprises an additional heterologous portion or domain that is capable of interacting with, associating with, or capable of forming a corresponding heterologous portion, antigen, or domain that is part of an inhibitor of base excision repair component. In some embodiments, the inhibitor of base excision repair can be targeted to the target nucleotide sequence by the guide polynucleotide. For example, in some embodiments, the inhibitor of base excision repair comprises an additional heterologous portion or domain (e.g., polynucleotide binding domain such as an RNA or DNA binding protein) that is capable of interacting with, associating with, or capable of forming a complex with a portion or segment (e.g., a polynucleotide motif) of a guide polynucleotide. In some embodiments, the additional heterologous portion or domain of the guide polynucleotide (e.g., polynucleotide binding domain such as an RNA or DNA binding protein) can be fused or linked to the inhibitor of base excision repair. In some embodiments, the additional heterologous portion may be capable of binding to, interacting with, associating with, or forming a complex with a polynucleotide. In some embodiments, the additional heterologous portion may be capable of binding to a guide polynucleotide. In some embodiments, the additional heterologous portion may be capable of binding to a polypeptide linker. In some embodiments, the additional heterologous portion may be capable of binding to a polynucleotide linker. An additional heterologous portion may be a protein domain. In some embodiments, an additional heterologous portion comprises a polypeptide, such as a 22 amino acid RNA-binding domain of the lambda bacteriophage antiterminator protein N (N22p), a 2G12 IgG homodimer domain, an ABI, an antibody (e.g. an antibody that binds a component of the base editor system or a heterologous portion thereof) or fragment thereof (e.g. heavy chain domain 2 (CH2) of IgM (MHD2) or IgE (EHD2), an immunoglobulin Fc region, a heavy chain domain 3 (CH3) of IgG or IgA, a heavy chain domain 4 (CH4) of IgM or IgE, an Fab, an Fab2, miniantibodies, and/or ZIP antibodies), a barnase-barstar dimer domain, a Bcl-xL domain, a Calcineurin A (CAN) domain, a Cardiac phospholamban transmembrane pentamer domain, a collagen domain, a Com RNA binding protein domain (e.g. SfMu Com coat protein domain, and SfMu Com binding protein domain), a Cyclophilin-Fas fusion protein (CyP-Fas) domain, a Fab domain, an Fc domain, a fibritin foldon domain, an FK506 binding protein (FKBP) domain, an FKBP binding domain (FRB) domain of mTOR, a foldon domain, a fragment X domain, a GAI domain, a GID1 domain, a Glycophorin A transmembrane domain, a GyrB domain, a Halo tag, an HIV Gp41 trimerisation domain, an HPV45 oncoprotein E7 C-terminal dimer domain, a hydrophobic polypeptide, a K Homology (KH) domain, a Ku protein domain (e.g., a Ku heterodimer), a leucine zipper, a LOV domain, a mitochondrial antiviral-signaling protein CARD filament domain, an MS2 coat protein domain (MCP), a non-natural RNA aptamer ligand that binds a corresponding RNA motif/aptamer, a parathyroid hormone dimerization domain, a PP7 coat protein (PCP) domain, a PSD95-Dlgl-zo-1 (PDZ) domain, a PYL domain, a SNAP tag, a SpyCatcher moiety, a SpyTag moiety, a streptavidin domain, a streptavidin-binding protein domain, a streptavidin binding protein (SBP) domain, a telomerase Sm7 protein domain (e.g. Sm7 homoheptamer or a monomeric Sm-like protein), and/or fragments thereof. In embodiments, an additional heterologous portion comprises a polynucleotide (e.g., an RNA motif), such as an MS2 phage operator stem-loop (e.g. an MS2, an MS2 C-5 mutant, or an MS2 F-5 mutant), a non-natural RNA motif, a PP7 opterator stem-loop, an SfMu phate Com stem-loop, a steril alpha motif, a telomerase Ku binding motif, a telomerase Sm7 binding motif, and/or fragments thereof. Non-limiting examples of additional heterologous portions include polypeptides with at least about 85% sequence identity to any one or more of SEQ ID NOs: 380, 382, 384, 386-388, or fragments thereof. Non-limiting examples of additional heterologous portions include polynucleotides with at least about 85% sequence identity to any one or more of SEQ ID NOs: 379, 381, 383, 385, or fragments thereof.

[0856] In some instances, components of the base editing system are associated with one another through the interaction of leucine zipper domains (e.g., SEQ ID NOs: 387 and 388). In some cases, components of the base editing system are associated with one another through polypeptide domains (e.g., FokI domains) that associate to form protein complexes containing about, at least about, or no more than about 1, 2 (i.e., dimerize), 3, 4, 5, 6, 7, 8, 9, 10 polypeptide domain units, optionally the polypeptide domains may include alterations that reduce or eliminate an activity thereof.

[0857] In some instances, components of the base editing system are associated with one another through the interaction of multimeric antibodies or fragments thereof (e.g., IgG, IgD, IgA, IgM, IgE, a heavy chain domain 2 (CH2) of IgM (MHD2) or IgE (EHD2), an immunoglobulin Fc region, a heavy chain domain 3 (CH3) of IgG or IgA, a heavy chain domain 4 (CH4) of IgM or IgE, an Fab, and an Fab2). In some instances, the antibodies are dimeric, trimeric, or tetrameric. In embodiments, the dimeric antibodies bind a polypeptide or polynucleotide component of the base editing system.

[0858] In some cases, components of the base editing system are associated with one another through the interaction of a polynucleotide-binding protein domain(s) with a polynucleotide(s). In some instances, components of the base editing system are associated with one another through the interaction of one or more polynucleotide-binding protein domains with polynucleotides that are self complementary and/or complementary to one another so that complementary binding of the polynucleotides to one another brings into association their respective bound polynucleotide-binding protein domain(s).

[0859] In some instances, components of the base editing system are associated with one another through the interaction of a polypeptide domain(s) with a small molecule(s) (e.g., chemical inducers of dimerization (CIDs), also known as “dimerizers”). Non-limiting examples of CIDs include those disclosed in Amara, et al., “A versatile synthetic dimerizer for the regulation of protein-protein interactions,” PNAS, 94:10618-10623 (1997); and VoB, et al. “Chemically induced dimerization: reversible and spatiotemporal control of protein function in cells,” Current Opinion in Chemical Biology, 28:194-201 (2015), the disclosures of each of which are incorporated herein by reference in their entireties for all purposes. Non-limiting examples of polypeptides that can dimerize and their corresponding dimerizing agents are provided in Table 10.1 below.

TABLE 10.1
Chemically induced dimerization systems.

| Dimerizing Polypeptides | | Dimerizing agent |
|---|---|---|
| FKBP | FKBP | FK1012 |
| FKBP | Calcineurin A (CNA) | FK506 |
| FKBP | CyP-Fas | FKCsA |
| FKBP | FRB (FKBP-rapamycin-binding) | Rapamycin |
| | domain of mTOR | |
| GyrB | GyrB | Coumermycin |
| GAI | GID1 (gibberellin insensitive | Gibberellin |
| | dwarf 1) | |
| ABI | PYL | Abscisic acid |
| ABI | PYRMandi | Mandipropamid |
| SNAP-tag | Halo Tag | HaXS |
| eDHFR | HaloTag | TMP-HTag |
| Bcl-xL | Fab (AZ1) | ABT-737 |

[0860] In embodiments, the additional heterologous portion is part of a guide RNA molecule. In some instances, the additional heterologous portion contains or is an RNA motif. The RNA motif may be positioned at the 5′ or 3′ end of the guide RNA molecule or various positions of a guide RNA molecule. In embodiments, the RNA motif is positioned within the guide RNA to reduce steric hindrance, optionally where such hindrance is associated with other bulky loops of an RNA scaffold. In some instances, it is advantageous to link the RNA motif is linked to other portions of the guide RNA by way of a linker, where the linker can be about, at least about, or no more than about 1, 2, 3, 4, 5, 6, 7, 8, 9, 10, or more nucleotides in length. Optionally, the linker contains a GC-rich nucleotide sequence. The guide RNA can contain 1, 2, 3, 4, 5, or more copies of the RNA motif, optionally where they are positioned consecutively, and/or optionally where they are each separated from one another by a linker(s). The RNA motif may include any one or more of the polynucleotide modifications described herein. Non-limiting examples of suitable modifications to the RNA motif include 2′ deoxy-2-aminopurine, 2′ribose-2-aminopurine, phosphorothioate mods, 2′-Omethyl mods, 2′-Fluro mods and LNA mods. Advantageously, the modifications help to increase stability and promote stronger bonds/folding structure of a hairpin(s) formed by the RNA motif.

[0861] In some embodiments, the RNA motif is modified to include an extension. In embodiments, the extension contains about, at least about, or no more than about 2, 3, 4, 5, 10, 15, 20, or 25 nucleotides. In some instances, the extension results in an alteration in the length of a stem formed by the RNA motif (e.g., a lengthening or a shortening). It can be advantageous for a stem formed by the RNA motif to be about, at least about, or no more than about 5, 10, 15, 20, 25, 30, 35, 40, 45, 50, 55, 60, 65, 70, 75, 80, 85, 90, 95, or 100 nucleotides in length. In various embodiments, the extension increases flexibility of the RNA motif and/or increases binding with a corresponding RNA motif.

[0862] In some embodiments, the base editor inhibits base excision repair (BER) of the edited strand. In some embodiments, the base editor protects or binds the non-edited strand. In some embodiments, the base editor comprises UGI activity or USP activity. In some embodiments, the base editor comprises a catalytically inactive inosine-specific nuclease. In some embodiments, the base editor comprises nickase activity. In some embodiments, the intended edit of base pair is upstream of a PAM site. In some embodiments, the intended edit of base pair is 1, 2, 3, 4, 5, 6, 7, 8, 9, 10, 11, 12, 13, 14, 15, 16, 17, 18, 19, or 20 nucleotides upstream of the PAM site. In some embodiments, the intended edit of base-pair is downstream of a PAM site. In some embodiments, the intended edited base pair is 1, 2, 3, 4, 5, 6, 7, 8, 9, 10, 11, 12, 13, 14, 15, 16, 17, 18, 19, or 20 nucleotides downstream stream of the PAM site.

[0863] In some embodiments, the method does not require a canonical (e.g., NGG) PAM site. In some embodiments, the nucleobase editor comprises a linker or a spacer. In some embodiments, the linker or spacer is 1-25 amino acids in length. In some embodiments, the linker or spacer is 5-20 amino acids in length. In some embodiments, the linker or spacer is 10, 11, 12, 13, 14, 15, 16, 17, 18, 19, or 20 amino acids in length.

[0864] In some embodiments, the base editing fusion proteins or complexes provided herein need to be positioned at a precise location, for example, where a target base is placed within a defined region (e.g., a “deamination window”). In some embodiments, a target can be within a 4 base region. In some embodiments, such a defined target region can be approximately 15 bases upstream of the PAM. See Komor, A. C., et al., “Programmable editing of a target base in genomic DNA without double-stranded DNA cleavage” Nature 533, 420-424 (2016); Gaudelli, N. M., et al., “Programmable base editing of A·T to G·C in genomic DNA without DNA cleavage” Nature 551, 464-471 (2017); and Komor, A. C., et al., “Improved base excision repair inhibition and bacteriophage Mu Gam protein yields C:G-to-T:A base editors with higher efficiency and product purity” Science Advances 3:eaao4774 (2017), the entire contents of which are hereby incorporated by reference.

[0865] In some embodiments, the target region comprises a target window, wherein the target window comprises the target nucleobase pair. In some embodiments, the target window comprises 1-10 nucleotides. In some embodiments, the target window is 1, 2, 3, 4, 5, 6, 7, 8, 9, 10, 11, 12, 13, 14, 15, 16, 17, 18, 19, or 20 nucleotides in length. In some embodiments, the intended edit of base pair is within the target window. In some embodiments, the target window comprises the intended edit of base pair. In some embodiments, the method is performed using any of the base editors provided herein. In some embodiments, a target window is a deamination window. A deamination window can be the defined region in which a base editor acts upon and deaminates a target nucleotide. In some embodiments, the deamination window is within a 2, 3, 4, 5, 6, 7, 8, 9, or 10 base regions. In some embodiments, the deamination window is 5, 6, 7, 8, 9, 10, 11, 12, 13, 14, 15, 16, 17, 18, 19, 20, 21, 22, 23, 24, or 25 bases upstream of the PAM.

[0866] The base editors of the present disclosure can comprise any domain, feature or amino acid sequence which facilitates the editing of a target polynucleotide sequence. For example, in some embodiments, the base editor comprises a nuclear localization sequence (NLS). In some embodiments, an NLS of the base editor is localized between a deaminase domain and a polynucleotide programmable nucleotide binding domain. In some embodiments, an NLS of the base editor is localized C-terminal to a polynucleotide programmable nucleotide binding domain.

[0867] Other exemplary features that can be present in a base editor as disclosed herein are localization sequences, such as cytoplasmic localization sequences, export sequences, such as nuclear export sequences, or other localization sequences, as well as sequence tags that are useful for solubilization, purification, or detection of the fusion proteins or complexes. Suitable protein tags provided herein include, but are not limited to, biotin carboxylase carrier protein (BCCP) tags, myc-tags, calmodulin-tags, FLAG-tags, hemagglutinin (HA)-tags, polyhistidine tags, also referred to as histidine tags or His-tags, maltose binding protein (MBP)-tags, nus-tags, glutathione-S-transferase (GST)-tags, green fluorescent protein (GFP)-tags, thioredoxin-tags, S-tags, Softags (e.g., Softag 1, Softag 3), strep-tags, biotin ligase tags, FlAsH tags, V5 tags, and SBP-tags. Additional suitable sequences will be apparent to those of skill in the art. In some embodiments, the fusion protein or complex comprises one or more His tags.

[0868] In some embodiments, non-limiting exemplary cytidine base editors (CBE) include BE1 (APOBEC1-XTEN-dCas9), BE2 (APOBEC1-XTEN-dCas9-UGI), BE3 (APOBEC1-XTEN-dCas9(A840H)-UGI), BE3-Gam, saBE3, saBE4-Gam, BE4, BE4-Gam, saBE4, or saB4E-Gam. BE4 extends the APOBEC1-Cas9n(D10A) linker to 32 amino acids and the Cas9n-UGI linker to 9 amino acids, and appends a second copy of UGI to the C-terminus of the construct with another 9-amino acid linker into a single base editor construct. The base editors saBE3 and saBE4 have the S. pyogenes Cas9n (D10A) replaced with the smaller S. aureus Cas9n(D10A). BE3-Gam, saBE3-Gam, BE4-Gam, and saBE4-Gam have 174 residues of Gam protein fused to the N-terminus of BE3, saBE3, BE4, and saBE4 via the 16 amino acid XTEN linker.

[0869] In some embodiments, the adenosine base editor (ABE) can deaminate adenine in DNA. In some embodiments, ABE is generated by replacing APOBEC1 component of BE3 with natural or engineered E. coli TadA, human ADAR2, mouse ADA, or human ADAT2. In some embodiments, ABE comprises evolved TadA variant. In some embodiments, the ABE is ABE 1.2 (TadA*-XTEN-nCas9-NLS). In some embodiments, TadA* comprises A106V and D108N mutations.

[0870] In some embodiments, the ABE is a second-generation ABE. In some embodiments, the ABE is ABE2.1, which comprises additional mutations D147Y and E155V in TadA* (TadA*2.1). In some embodiments, the ABE is ABE2.2, ABE2.1 fused to catalytically inactivated version of human alkyl adenine DNA glycosylase (AAG with E125Q mutation). In some embodiments, the ABE is ABE2.3, ABE2.1 fused to catalytically inactivated version of E. coli Endo V (inactivated with D35A mutation). In some embodiments, the ABE is ABE2.6 which has a linker twice as long (32 amino acids, (SGGS)₂ (SEQ ID NO: 330)-XTEN-(SGGS)₂ (SEQ ID NO: 330)) as the linker in ABE2.1. In some embodiments, the ABE is ABE2.7, which is ABE2.1 tethered with an additional wild-type TadA monomer. In some embodiments, the ABE is ABE2.8, which is ABE2.1 tethered with an additional TadA*2.1 monomer. In some embodiments, the ABE is ABE2.9, which is a direct fusion of evolved TadA (TadA*2.1) to the N-terminus of ABE2.1. In some embodiments, the ABE is ABE2.10, which is a direct fusion of wild-type TadA to the N-terminus of ABE2.1. In some embodiments, the ABE is ABE2.11, which is ABE2.9 with an inactivating E59A mutation at the N-terminus of TadA* monomer. In some embodiments, the ABE is ABE2.12, which is ABE2.9 with an inactivating E59A mutation in the internal TadA* monomer.

[0871] In some embodiments, the ABE is a third generation ABE. In some embodiments, the ABE is ABE3.1, which is ABE2.3 with three additional TadA mutations (L84F, H123Y, and 1156F).

[0872] In some embodiments, the ABE is a fourth generation ABE. In some embodiments, the ABE is ABE4.3, which is ABE3.1 with an additional TadA mutation A142N (TadA*4.3).

[0873] In some embodiments, the ABE is a fifth generation ABE. In some embodiments, the ABE is ABE5.1, which is generated by importing a consensus set of mutations from surviving clones (H36L, R51L, S146C, and K157N) into ABE3.1. In some embodiments, the ABE is ABE5.3, which has a heterodimeric construct containing wild-type E. coli TadA fused to an internal evolved TadA*. In some embodiments, the ABE is ABE5.2, ABE5.4, ABE5.5, ABE5.6, ABE5.7, ABE5.8, ABE5.9, ABE5.10, ABE5.11, ABE5.12, ABE5.13, or ABE5.14, as shown in Table 10 below. In some embodiments, the ABE is a sixth generation ABE. In some embodiments, the ABE is ABE6.1, ABE6.2, ABE6.3, ABE6.4, ABE6.5, or ABE6.6, as shown in Table 10 below. In some embodiments, the ABE is a seventh generation ABE. In some embodiments, the ABE is ABET.1, ABE7.2, ABE7.3, ABE7.4, ABE7.5, ABE7.6, ABE7.7, ABE7.8, ABE 7.9, or ABET.10, as shown in Table 10 below.

TABLE 10
Genotypes of ABEs

| | 23 | 26 | 36 | 37 | 48 | 49 | 51 | 72 | 84 | 87 | 106 | 108 | 123 | 125 | 142 | 146 | 147 | 152 | 155 | 156 | 157 | 161 |
|---|---|---|---|---|---|---|---|---|---|---|---|---|---|---|---|---|---|---|---|---|---|---|
| ABE0.1 | W | R | H | N | P | | R | N | L | S | A | D | H | G | A | S | D | R | E | I | K | K |
| ABE0.2 | W | R | H | N | P | | R | N | L | S | A | D | H | G | A | S | D | R | E | I | K | K |
| ABE1.1 | W | R | H | N | P | | R | N | L | S | A | N | H | G | A | S | D | R | E | I | K | K |
| ABE1.2 | W | R | H | N | P | | R | N | L | S | V | N | H | G | A | S | D | R | E | I | K | K |
| ABE2.1 | W | R | H | N | P | | R | N | L | S | V | N | H | G | A | S | Y | R | V | I | K | K |
| ABE2.2 | W | R | H | N | P | | R | N | L | S | V | N | H | G | A | S | Y | R | V | I | K | K |
| ABE2.3 | W | R | H | N | P | | R | N | L | S | V | N | H | G | A | S | Y | R | V | I | K | K |
| ABE2.4 | W | R | H | N | P | | R | N | L | S | V | N | H | G | A | S | Y | R | V | I | K | K |
| ABE2.5 | W | R | H | N | P | | R | N | L | S | V | N | H | G | A | S | Y | R | V | I | K | K |
| ABE2.6 | W | R | H | N | P | | R | N | L | S | V | N | H | G | A | S | Y | R | V | I | K | K |
| ABE2.7 | W | R | H | N | P | | R | N | L | S | V | N | H | G | A | S | Y | R | V | I | K | K |
| ABE2.8 | W | R | H | N | P | | R | N | L | S | V | N | H | G | A | S | Y | R | V | I | K | K |
| ABE2.9 | W | R | H | N | P | | R | N | L | S | V | N | H | G | A | S | Y | R | V | I | K | K |
| ABE2.10 | W | R | H | N | P | | R | N | L | S | V | N | H | G | A | S | Y | R | V | I | K | K |
| ABE2.11 | W | R | H | N | P | | R | N | L | S | V | N | H | G | A | S | Y | R | V | I | K | K |
| ABE2.12 | W | R | H | N | P | | R | N | L | S | V | N | H | G | A | S | Y | R | V | I | K | K |
| ABE3.1 | W | R | H | N | P | | R | N | F | S | V | N | Y | G | A | S | Y | R | V | F | K | K |
| ABE3.2 | W | R | H | N | P | | R | N | F | S | V | N | Y | G | A | S | Y | R | V | F | K | K |
| ABE3.3 | W | R | H | N | P | | R | N | F | S | V | N | Y | G | A | S | Y | R | V | F | K | K |
| ABE3.4 | W | R | H | N | P | | R | N | F | S | V | N | Y | G | A | S | Y | R | V | F | K | K |
| ABE3.5 | W | R | H | N | P | | R | N | F | S | V | N | Y | G | A | S | Y | R | V | F | K | K |
| ABE3.6 | W | R | H | N | P | | R | N | F | S | V | N | Y | G | A | S | Y | R | V | F | K | K |
| ABE3.7 | W | R | H | N | P | | R | N | F | S | V | N | Y | G | A | S | Y | R | V | F | K | K |
| ABE3.8 | W | R | H | N | P | | R | N | F | S | V | N | Y | G | A | S | Y | R | V | F | K | K |
| ABE4.1 | W | R | H | N | P | | R | N | L | S | V | N | H | G | N | S | Y | R | V | I | K | K |
| ABE4.2 | W | G | H | N | P | | R | N | L | S | V | N | H | G | N | S | Y | R | V | I | K | K |
| ABE4.3 | W | R | H | N | P | | R | N | F | S | V | N | Y | G | N | S | Y | R | V | F | K | K |
| ABE5.1 | W | R | L | N | P | | L | N | F | S | V | N | Y | G | A | C | Y | R | V | F | N | K |
| ABE5.2 | W | R | H | S | P | | R | N | F | S | V | N | Y | G | A | S | Y | R | V | F | K | T |
| ABE5.3 | W | R | L | N | P | | L | N | I | S | V | N | Y | G | A | C | Y | R | V | F | N | K |
| ABE5.4 | W | R | H | S | P | | R | N | F | S | V | N | Y | G | A | S | Y | R | V | F | K | T |
| ABE5.5 | W | R | L | N | P | | L | N | F | S | V | N | Y | G | A | C | Y | R | V | F | N | K |
| ABE5.6 | W | R | L | N | P | | L | N | F | S | V | N | Y | G | A | C | Y | R | V | F | N | K |
| ABE5.7 | W | R | L | N | P | | L | N | F | S | V | N | Y | G | A | C | Y | R | V | F | N | K |
| ABE5.8 | W | R | L | N | P | | L | N | F | S | V | N | Y | G | A | C | Y | R | V | F | N | K |
| ABE5.9 | W | R | L | N | P | | L | N | F | S | V | N | Y | G | A | C | Y | R | V | F | N | K |
| ABE5.10 | W | R | L | N | P | | L | N | F | S | V | N | Y | G | A | C | Y | R | V | F | N | K |
| ABE5.11 | W | R | L | N | P | | L | N | F | S | V | N | Y | G | A | C | Y | R | V | F | N | K |
| ABE5.12 | W | R | L | N | P | | L | N | F | S | V | N | Y | G | A | C | Y | R | V | F | N | K |
| ABE5.13 | W | R | H | N | P | | L | D | F | S | V | N | Y | A | A | S | Y | R | V | F | K | K |
| ABE5.14 | W | R | H | N | S | | L | N | F | C | V | N | Y | G | A | S | Y | R | V | F | K | K |
| ABE6.1 | W | R | H | N | S | | L | N | F | S | V | N | Y | G | N | S | Y | R | V | F | K | K |
| ABE6.2 | W | R | H | N | T | V | L | N | F | S | V | N | Y | G | N | S | Y | R | V | F | N | K |
| ABE6.3 | W | R | H | N | S | | L | N | F | S | V | N | Y | G | A | C | Y | R | V | F | N | K |
| ABE6.4 | W | R | L | N | S | | L | N | F | S | V | N | Y | G | N | C | Y | R | V | F | N | K |
| ABE6.5 | W | R | L | N | T | V | L | N | F | S | V | N | Y | G | A | C | Y | R | V | F | N | K |
| ABE6.6 | W | R | L | N | T | V | L | N | F | S | V | N | Y | G | N | C | Y | R | V | F | N | K |
| ABE7.1 | W | R | L | N | A | | L | N | F | S | V | N | Y | G | A | C | Y | R | V | F | N | K |
| ABE7.2 | W | R | L | N | A | | L | N | F | S | V | N | Y | G | N | C | Y | R | V | F | N | K |
| ABE7.3 | L | R | L | N | A | | L | N | F | S | V | N | Y | G | A | C | Y | R | V | F | N | K |
| ABE7.4 | R | R | L | N | A | | L | N | F | S | V | N | Y | G | A | C | Y | R | V | F | N | K |
| ABE7.5 | W | R | L | N | A | | L | N | F | S | V | N | Y | G | A | C | Y | H | V | F | N | K |
| ABE7.6 | W | R | L | N | A | | L | N | I | S | V | N | Y | G | A | C | Y | P | V | F | N | K |
| ABE7.7 | L | R | L | N | A | | L | N | F | S | V | N | Y | G | A | C | Y | P | V | F | N | K |
| ABE7.8 | L | R | L | N | A | | L | N | F | S | V | N | Y | G | A | C | Y | R | V | F | N | K |
| ABE7.9 | L | R | L | N | A | | L | N | F | S | V | N | Y | G | N | C | Y | P | V | F | N | K |
| ABE7.10 | R | R | L | N | A | | L | N | F | S | V | N | Y | G | A | C | Y | P | V | F | N | K |

[0874] In some embodiments, the base editor is an eighth generation ABE (ABE8). In some embodiments, the ABE8 contains a TadA*8 variant. In some embodiments, the ABE8 has a monomeric construct containing a TadA*8 variant (“ABE8.x-m”). In some embodiments, the ABE8 is ABE8.1-m, which has a monomeric construct containing TadA*7.10 with a Y147T mutation (TadA*8.1). In some embodiments, the ABE8 is ABE8.2-m, which has a monomeric construct containing TadA*7.10 with a Y147R mutation (TadA*8.2). In some embodiments, the ABE8 is ABE8.3-m, which has a monomeric construct containing TadA*7.10 with a Q154S mutation (TadA*8.3). In some embodiments, the ABE8 is ABE8.4-m, which has a monomeric construct containing TadA*7.10 with a Y123H mutation (TadA*8.4). In some embodiments, the ABE8 is ABE8.5-m, which has a monomeric construct containing TadA*7.10 with a V82S mutation (TadA*8.5). In some embodiments, the ABE8 is ABE8.6-m, which has a monomeric construct containing TadA*7.10 with a T166R mutation (TadA*8.6). In some embodiments, the ABE8 is ABE8.7-m, which has a monomeric construct containing TadA*7.10 with a Q154R mutation (TadA*8.7). In some embodiments, the ABE8 is ABE8.8-m, which has a monomeric construct containing TadA*7.10 with Y147R, Q154R, and Y123H mutations (TadA*8.8). In some embodiments, the ABE8 is ABE8.9-m, which has a monomeric construct containing TadA*7.10 with Y147R, Q154R and I76Y mutations (TadA*8.9). In some embodiments, the ABE8 is ABE8.10-m, which has a monomeric construct containing TadA*7.10 with Y147R, Q154R, and T166R mutations (TadA*8.10). In some embodiments, the ABE8 is ABE8.11-m, which has a monomeric construct containing TadA*7.10 with Y147T and Q154R mutations (TadA*8.11). In some embodiments, the ABE8 is ABE8.12-m, which has a monomeric construct containing TadA*7.10 with Y147T and Q154S mutations (TadA*8.12).

[0875] In some embodiments, the ABE8 is ABE8.13-m, which has a monomeric construct containing TadA*7.10 with Y123H (Y123H reverted from H123Y), Y147R, Q154R and I76Y mutations (TadA*8.13). In some embodiments, the ABE8 is ABE8.14-m, which has a monomeric construct containing TadA*7.10 with I76Y and V82S mutations (TadA*8.14). In some embodiments, the ABE8 is ABE8.15-m, which has a monomeric construct containing TadA*7.10 with V82S and Y147R mutations (TadA*8.15). In some embodiments, the ABE8 is ABE8.16-m, which has a monomeric construct containing TadA*7.10 with V82S, Y123H (Y123H reverted from H123Y) and Y147R mutations (TadA*8.16). In some embodiments, the ABE8 is ABE8.17-m, which has a monomeric construct containing TadA*7.10 with V82S and Q154R mutations (TadA*8.17). In some embodiments, the ABE8 is ABE8.18-m, which has a monomeric construct containing TadA*7.10 with V82S, Y123H (Y123H reverted from H123Y) and Q154R mutations (TadA*8.18). In some embodiments, the ABE8 is ABE8.19-m, which has a monomeric construct containing TadA*7.10 with V82S, Y123H (Y123H reverted from H123Y), Y147R and Q154R mutations (TadA*8.19). In some embodiments, the ABE8 is ABE8.20-m, which has a monomeric construct containing TadA*7.10 with I76Y, V82S, Y123H (Y123H reverted from H123Y), Y147R and Q154R mutations (TadA*8.20). In some embodiments, the ABE8 is ABE8.21-m, which has a monomeric construct containing TadA*7.10 with Y147R and Q154S mutations (TadA*8.21). In some embodiments, the ABE8 is ABE8.22-m, which has a monomeric construct containing TadA*7.10 with V82S and Q154S mutations (TadA*8.22). In some embodiments, the ABE8 is ABE8.23-m, which has a monomeric construct containing TadA*7.10 with V82S and Y123H (Y123H reverted from H123Y) mutations (TadA*8.23). In some embodiments, the ABE8 is ABE8.24-m, which has a monomeric construct containing TadA*7.10 with V82S, Y123H (Y123H reverted from H123Y), and Y147T mutations (TadA*8.24).

[0876] In some embodiments, the ABE8 has a heterodimeric construct containing wild-type E. coli TadA fused to a TadA*8 variant (“ABE8.x-d”). In some embodiments, the ABE8 is ABE8.1-d, which has a heterodimeric construct containing wild-type E. coli TadA fused to TadA*7.10 with a Y147T mutation (TadA*8.1). In some embodiments, the ABE8 is ABE8.2-d, which has a heterodimeric construct containing wild-type E. coli TadA fused to TadA*7.10 with a Y147R mutation (TadA*8.2). In some embodiments, the ABE8 is ABE8.3-d, which has a heterodimeric construct containing wild-type E. coli TadA fused to TadA*7.10 with a Q154S mutation (TadA*8.3). In some embodiments, the ABE8 is ABE8.4-d, which has a heterodimeric construct containing wild-type E. coli TadA fused to TadA*7.10 with a Y123H mutation (TadA*8.4). In some embodiments, the ABE8 is ABE8.5-d, which has a heterodimeric construct containing wild-type E. coli TadA fused to TadA*7.10 with a V82S mutation (TadA*8.5). In some embodiments, the ABE8 is ABE8.6-d, which has a heterodimeric construct containing wild-type E. coli TadA fused to TadA*7.10 with a T166R mutation (TadA*8.6). In some embodiments, the ABE8 is ABE8.7-d, which has a heterodimeric construct containing wild-type E. coli TadA fused to TadA*7.10 with a Q154R mutation (TadA*8.7). In some embodiments, the ABE8 is ABE8.8-d, which has a heterodimeric construct containing wild-type E. coli TadA fused to TadA*7.10 with Y147R, Q154R, and Y123H mutations (TadA*8.8). In some embodiments, the ABE8 is ABE8.9-d, which has a heterodimeric construct containing wild-type E. coli TadA fused to TadA*7.10 with Y147R, Q154R and I76Y mutations (TadA*8.9). In some embodiments, the ABE8 is ABE8.10-d, which has a heterodimeric construct containing wild-type E. coli TadA fused to TadA*7.10 with Y147R, Q154R, and T166R mutations (TadA*8.10). In some embodiments, the ABE8 is ABE8.11-d, which has a heterodimeric construct containing wild-type E. coli TadA fused to TadA*7.10 with Y147T and Q154R mutations (TadA*8.11). In some embodiments, the ABE8 is ABE8.12-d, which has heterodimeric construct containing wild-type E. coli TadA fused to TadA*7.10 with Y147T and Q154S mutations (TadA*8.12). In some embodiments, the ABE8 is ABE8.13-d, which has a heterodimeric construct containing wild-type E. coli TadA fused to TadA*7.10 with Y123H (Y123H reverted from H123Y), Y147R, Q154R and I76Y mutations (TadA*8.13). In some embodiments, the ABE8 is ABE8.14-d, which has a heterodimeric construct containing wild-type E. coli TadA fused to TadA*7.10 with 176Y and V82S mutations (TadA*8.14). In some embodiments, the ABE8 is ABE8.15-d, which has a heterodimeric construct containing wild-type E. coli TadA fused to TadA*7.10 with V82S and Y147R mutations (TadA*8.15). In some embodiments, the ABE8 is ABE8.16-d, which has a heterodimeric construct containing wild-type E. coli TadA fused to TadA*7.10 with V82S, Y123H (Y123H reverted from H123Y) and Y147R mutations (TadA*8.16). In some embodiments, the ABE8 is ABE8.17-d, which has a heterodimeric construct containing wild-type E. coli TadA fused to TadA*7.10 with V82S and Q154R mutations (TadA*8.17). In some embodiments, the ABE8 is ABE8.18-d, which has a heterodimeric construct containing wild-type E. coli TadA fused to TadA*7.10 with V82S, Y123H (Y123H reverted from H123Y) and Q154R mutations (TadA*8.18). In some embodiments, the ABE8 is ABE8.19-d, which has a heterodimeric construct containing wild-type E. coli TadA fused to TadA*7.10 with V82S, Y123H (Y123H reverted from H123Y), Y147R and Q154R mutations (TadA*8.19). In some embodiments, the ABE8 is ABE8.20-d, which has a heterodimeric construct containing wild-type E. coli TadA fused to TadA*7.10 with 176Y, V82S, Y123H (Y123H reverted from H123Y), Y147R and Q154R mutations (TadA*8.20). In some embodiments, the ABE8 is ABE8.21-d, which has a heterodimeric construct containing wild-type E. coli TadA fused to TadA*7.10 with Y147R and Q154S mutations (TadA*8.21). In some embodiments, the ABE8 is ABE8.22-d, which has a heterodimeric construct containing wild-type E. coli TadA fused to TadA*7.10 with V82S and Q154S mutations (TadA*8.22). In some embodiments, the ABE8 is ABE8.23-d, which has a heterodimeric construct containing wild-type E. coli TadA fused to TadA*7.10 with V82S and Y123H (Y123H reverted from H123Y) mutations (TadA*8.23). In some embodiments, the ABE8 is ABE8.24-d, which has a heterodimeric construct containing wild-type E. coli TadA fused to TadA*7.10 with V82S, Y123H (Y123H reverted from H123Y), and Y147T mutations (TadA*8.24).

[0877] In some embodiments, the ABE8 has a heterodimeric construct containing TadA*7.10 fused to a TadA*8 variant (“ABE8.x-7”). In some embodiments, the ABE8 is ABE8.1-7, which has a heterodimeric construct containing TadA*7.10 fused to TadA*7.10 with a Y147T mutation (TadA*8.1). In some embodiments, the ABE8 is ABE8.2-7, which has a heterodimeric construct containing TadA*7.10 fused to TadA*7.10 with a Y147R mutation (TadA*8.2). In some embodiments, the ABE8 is ABE8.3-7, which has a heterodimeric construct containing TadA*7.10 fused to TadA*7.10 with a Q154S mutation (TadA*8.3). In some embodiments, the ABE8 is ABE8.4-7, which has a heterodimeric construct containing TadA*7.10 fused to TadA*7.10 with a Y123H mutation (TadA*8.4). In some embodiments, the ABE8 is ABE8.5-7, which has a heterodimeric construct containing TadA*7.10 fused to TadA*7.10 with a V82S mutation (TadA*8.5). In some embodiments, the ABE8 is ABE8.6-7, which has a heterodimeric construct containing TadA*7.10 fused to TadA*7.10 with a T166R mutation (TadA*8.6). In some embodiments, the ABE8 is ABE8.7-7, which has a heterodimeric construct containing TadA*7.10 fused to TadA*7.10 with a Q154R mutation (TadA*8.7). In some embodiments, the ABE8 is ABE8.8-7, which has a heterodimeric construct containing TadA*7.10 fused to TadA*7.10 with Y147R, Q154R, and Y123H mutations (TadA*8.8). In some embodiments, the ABE8 is ABE8.9-7, which has a heterodimeric construct containing TadA*7.10 fused to TadA*7.10 with Y147R, Q154R and I76Y mutations (TadA*8.9). In some embodiments, the ABE8 is ABE8.10-7, which has a heterodimeric construct containing TadA*7.10 fused to TadA*7.10 with Y147R, Q154R, and T166R mutations (TadA*8.10). In some embodiments, the ABE8 is ABE8.11-7, which has a heterodimeric construct containing TadA*7.10 fused to TadA*7.10 with Y147T and Q154R mutations (TadA*8.11). In some embodiments, the ABE8 is ABE8.12-7, which has a heterodimeric construct containing TadA*7.10 fused to TadA*7.10 with Y147T and Q154S mutations (TadA*8.12). In some embodiments, the ABE8 is ABE8.13-7, which has a heterodimeric construct containing TadA*7.10 fused to TadA*7.10 with Y123H (Y123H reverted from H123Y), Y147R, Q154R and I76Y mutations (TadA*8.13). In some embodiments, the ABE8 is ABE8.14-7, which has a heterodimeric construct containing TadA*7.10 fused to TadA*7.10 with I76Y and V82S mutations (TadA*8.14). In some embodiments, the ABE8 is ABE8.15-7, which has a heterodimeric construct containing TadA*7.10 fused to TadA*7.10 with V82S and Y147R mutations (TadA*8.15). In some embodiments, the ABE8 is ABE8.16-7, which has a heterodimeric construct containing TadA*7.10 fused to TadA*7.10 with V82S, Y123H (Y123H reverted from H123Y) and Y147R mutations (TadA*8.16). In some embodiments, the ABE8 is ABE8.17-7, which has a heterodimeric construct containing TadA*7.10 fused to TadA*7.10 with V82S and Q154R mutations (TadA*8.17). In some embodiments, the ABE8 is ABE8.18-7, which has a heterodimeric construct containing TadA*7.10 fused to TadA*7.10 with V82S, Y123H (Y123H reverted from H123Y) and Q154R mutations (TadA*8.18). In some embodiments, the ABE8 is ABE8.19-7, which has a heterodimeric construct containing TadA*7.10 fused to TadA*7.10 with V82S, Y123H (Y123H reverted from H123Y), Y147R and Q154R mutations (TadA*8.19). In some embodiments, the ABE8 is ABE8.20-7, which has a heterodimeric construct containing TadA*7.10 fused to TadA*7.10 with I76Y, V82S, Y123H (Y123H reverted from H123Y), Y147R and Q154R mutations (TadA*8.20). In some embodiments, the ABE8 is ABE8.21-7, which has a heterodimeric construct containing TadA*7.10 fused to TadA*7.10 with Y147R and Q154S mutations (TadA*8.21). In some embodiments, the ABE8 is ABE8.22-7, which has a heterodimeric construct containing TadA*7.10 fused to TadA*7.10 with V82S and Q154S mutations (TadA*8.22). In some embodiments, the ABE8 is ABE8.23-7, which has a heterodimeric construct containing TadA*7.10 fused to TadA*7.10 with V82S and Y123H (Y123H reverted from H123Y) mutations (TadA*8.23). In some embodiments, the ABE8 is ABE8.24-7, which has a heterodimeric construct containing TadA*7.10 fused to TadA*7.10 with V82S, Y123H (Y123H reverted from H123Y), and Y147T mutations (TadA*8.24

[0878] In some embodiments, the ABE is ABE8.1-m, ABE8.2-m, ABE8.3-m, ABE8.4-m, ABE8.5-m, ABE8.6-m, ABE8.7-m, ABE8.8-m, ABE8.9-m, ABE8.10-m, ABE8.11-m, ABE8.12-m, ABE8.13-m, ABE8.14-m, ABE8.15-m, ABE8.16-m, ABE8.17-m, ABE8.18-m, ABE8.19-m, ABE8.20-m, ABE8.21-m, ABE8.22-m, ABE8.23-m, ABE8.24-m, ABE8.1-d, ABE8.2-d, ABE8.3-d, ABE8.4-d, ABE8.5-d, ABE8.6-d, ABE8.7-d, ABE8.8-d, ABE8.9-d, ABE8.10-d, ABE8.11-d, ABE8.12-d, ABE8.13-d, ABE8.14-d, ABE8.15-d, ABE8.16-d, ABE8.17-d, ABE8.18-d, ABE8.19-d, ABE8.20-d, ABE8.21-d, ABE8.22-d, ABE8.23-d, or ABE8.24-d as shown in Table 11 below.

TABLE 11
Adenosine Base Editor 8 (ABE8) Variants

| ABE8 | Adenosine Deaminase | Adenosine Deaminase Description |
|---|---|---|
| ABE8.1-m | TadA*8.1 | Monomer_TadA*7.10 + Y147T |
| ABE8.2-m | TadA*8.2 | Monomer_TadA*7.10 + Y147R |
| ABE8.3-m | TadA*8.3 | Monomer_TadA*7.10 + Q154S |
| ABE8.4-m | TadA*8.4 | Monomer_TadA*7.10 + Y123H |
| ABE8.5-m | TadA*8.5 | Monomer_TadA*7.10 + V82S |
| ABE8.6-m | TadA*8.6 | Monomer_TadA*7.10 + T166R |
| ABE8.7-m | TadA*8.7 | Monomer_TadA*7.10 + Q154R |
| ABE8.8-m | TadA*8.8 | Monomer_TadA*7.10 + Y147R_Q154R_Y123H |
| ABE8.9-m | TadA*8.9 | Monomer_TadA*7.10 + Y147R_Q154R_I76Y |
| ABE8.10-m | TadA*8.10 | Monomer_TadA*7.10 + Y147R_Q154R_T166R |
| ABE8.11-m | TadA*8.11 | Monomer_TadA*7.10 + Y147T_Q154R |
| ABE8.12-m | TadA*8.12 | Monomer_TadA*7.10 + Y147T_Q154S |
| ABE8.13-m | TadA*8.13 | Monomer_TadA*7.10 + |
| | | Y123H_Y147R_Q154R_I76Y |
| ABE8.14-m | TadA*8.14 | Monomer_TadA*7.10 + I76Y_V82S |
| ABE8.15-m | TadA*8.15 | Monomer_TadA*7.10 + V82S_Y147R |
| ABE8.16-m | TadA*8.16 | Monomer_TadA*7.10 + V82S_Y123H_Y147R |
| ABE8.17-m | TadA*8.17 | Monomer_TadA*7.10 + V82S_Q154R |
| ABE8.18-m | TadA*8.18 | Monomer_TadA*7.10 + V82S_Y123H_Q154R |
| ABE8.19-m | TadA*8.19 | Monomer_TadA*7.10 + |
| | | V82S_Y123H_Y147R_Q154R |
| ABE8.20-m | TadA*8.20 | Monomer_TadA*7.10 + |
| | | I76Y_V82S_Y123H_Y147R_Q154R |
| ABE8.21-m | TadA*8.21 | Monomer_TadA*7.10 + Y147R_Q154S |
| ABE8.22-m | TadA*8.22 | Monomer_TadA*7.10 + V82S_Q154S |
| ABE8.23-m | TadA*8.23 | Monomer_TadA*7.10 + V82S Y123H |
| ABE8.24-m | TadA*8.24 | Monomer_TadA*7.10 + V82S_Y123H_Y147T |
| ABE8.1-d | TadA*8.1 | Heterodimer_(WT) + (TadA*7.10 + Y147T) |
| ABE8.2-d | TadA*8.2 | Heterodimer_(WT) + (TadA*7.10 + Y147R) |
| ABE8.3-d | TadA*8.3 | Heterodimer_(WT) + (TadA*7.10 + Q154S) |
| ABE8.4-d | TadA*8.4 | Heterodimer_(WT) + (TadA*7.10 + Y123H) |
| ABE8.5-d | TadA*8.5 | Heterodimer_(WT) + (TadA*7.10 + V82S) |
| ABE8.6-d | TadA*8.6 | Heterodimer_(WT) + (TadA*7.10 + T166R) |
| ABE8.7-d | TadA*8.7 | Heterodimer_(WT) + (TadA*7.10 + Q154R) |
| ABE8.8-d | TadA*8.8 | Heterodimer_(WT) + (TadA*7.10 + |
| | | Y147R_Q154R_Y123H) |
| ABE8.9-d | TadA*8.9 | Heterodimer (WT) + (TadA*7.10 + |
| | | Y147R_Q154R_I76Y) |
| ABE8.10-d | TadA*8.10 | Heterodimer_(WT) + (TadA*7.10 + |
| | | Y147R_Q154R_T166R) |
| ABE8.11-d | TadA*8.11 | Heterodimer_(WT) + (TadA*7.10 + Y147T_Q154R) |
| ABE8.12-d | TadA*8.12 | Heterodimer_(WT) + (TadA*7.10 + Y147T_Q154S) |
| ABE8.13-d | TadA*8.13 | Heterodimer_(WT) + (TadA*7.10 + |
| | | Y123H_Y147T_Q154R_I76Y) |
| ABE8.14-d | TadA*8.14 | Heterodimer_(WT) + (TadA*7.10 + I76Y_V82S) |
| ABE8.15-d | TadA*8.15 | Heterodimer_(WT) + (TadA*7.10 + V82S_Y147R) |
| ABE8.16-d | TadA*8.16 | Heterodimer_(WT) + (TadA*7.10 + |
| | | V82S_Y123H_Y147R) |
| ABE8.17-d | TadA*8.17 | Heterodimer_(WT) + (TadA*7.10 + V82S_Q154R) |
| ABE8.18-d | TadA*8.18 | Heterodimer_(WT) + (TadA*7.10 + |
| | | V82S_Y123H_Q154R) |
| ABE8.19-d | TadA*8.19 | Heterodimer_(WT) + (TadA*7.10 + |
| | | V82S_Y123H_Y147R_Q154R) |
| ABE8.20-d | TadA*8.20 | Heterodimer (WT) + (TadA*7.10 + |
| | | I76Y_V82S_Y123H_Y147R_Q154R) |
| ABE8.21-d | TadA*8.21 | Heterodimer_(WT) + (TadA*7.10 + Y147R_Q154S) |
| ABE8.22-d | TadA*8.22 | Heterodimer_(WT) + (TadA*7.10 + V82S_Q154S) |
| ABE8.23-d | TadA*8.23 | Heterodimer_(WT) + (TadA*7.10 + V82S_Y123H) |
| ABE8.24-d | TadA*8.24 | Heterodimer_(WT) + (TadA*7.10 + |
| | | V82S_Y123H_Y147T) |

[0879] In some embodiments, the ABE8 is ABE8a-m, which has a monomeric construct containing TadA*7.10 with R26C, A1U09S, T111R, D119N, H122N, Y1471D, F149Y, T1661, and D167N mutations (TadA*8a). In some embodiments, the ABE8 is ABE8b-m, which has a monomeric construct containing TadA*7.10 with V88A, A109S, T111R, D119N, H122N, F149Y, T1661, and D167N mutations (TadA*8b). In some embodiments, the ABE8 is ABE8c-m, which has a monomeric construct containing TadA*7.10 with R26C, A109S, T111R, D119N, H122N, F149Y, T1661, and D167N mutations (TadA*8c). In some embodiments, the ABE8 is ABE8d-m, which has a monomeric construct containing TadA*7.10 with V88A, T111R, D119N, and F149Y mutations (TadA*8d). In some embodiments, the ABE8 is ABE8e-m, which has a monomeric construct containing TadA*7.10 with A109S, T111R, D119N, H122N, Y147D, F149Y, T1661, and D167N mutations (TadA*8e).

[0880] In some embodiments, the ABE8 is ABE8a-d, which has a heterodimeric construct containing wild-type E. coli TadA fused to TadA*7.10 with R26C, A109S, T111R, D119, H122N, Y147D, F149Y, T1661, and D167N mutations (TadA*8a). In some embodiments, the ABE8 is ABE8b-d, which has a heterodimeric construct containing wild-type E. coli TadA fused to TadA*7.10 with V88A, A109S, T111R, D119N, H122N, F149Y, T1661, and D167N mutations (TadA*8b). In some embodiments, the ABE8 is ABE8c-d, which has a heterodimeric construct containing wild-type E. coli TadA fused to TadA*7.10 with R26C, A109S, T111R, D119N, H122N, F149Y, T1661, and D167N mutations (TadA*8c). In some embodiments, the ABE8 is ABE8d-d, which has a heterodimeric construct containing wild-type E. coli TadA fused to TadA*7.10 with V88A, T111R, D119N, and F149Y mutations (TadA*8d). In some embodiments, the ABE8 is ABE8e-d, which has a heterodimeric construct containing wild-type E. coli TadA fused to TadA*7.10 with A109S, T111R, D119N, H122N, Y147D, F149Y, T1661, and D167N mutations (TadA*8e).

[0881] In some embodiments, the ABE8 is ABE8a-7, which has a heterodimeric construct containing TadA*7.10 fused to TadA*7.10 with R26C, A109S, T111R, D119, H122N, Y147D, F149Y, T1661, and D167N mutations (TadA*8a). In some embodiments, the ABE8 is ABE8b-7, which has a heterodimeric construct containing TadA*7.10 fused to TadA*7.10 with V88A, A109S, T111R, Di 19N, H122N, F149Y, T166I, and D167N mutations (TadA*8b). In some embodiments, the ABE8 is ABE8c-7, which has a heterodimeric construct containing TadA*7.10 fused to TadA*7.10 with R26C, A109S, T111R, D119N, H122N, F149Y, T1661, and D167N mutations (TadA*8c). In some embodiments, the ABE8 is ABE8d-7, which has a heterodimeric construct containing TadA*7.10 fused to TadA*7.10 with V88A, T111R, D119N, and F149Y mutations (TadA*8d). In some embodiments, the ABE8 is ABE8e-7, which has a heterodimeric construct containing TadA*7.10 fused to TadA*7.10 with A109S, T111R, D119N, H122N, Y147D, F149Y, T1661, and D167N mutations (TadA*8e).

[0882] In some embodiments, the ABE is ABE8a-m, ABE8b-m, ABE8c-m, ABE8d-m, ABE8e-m, ABE8a-d, ABE8b-d, ABE8c-d, ABE8d-d, or ABE8e-d, as shown in Table 12 below. In some embodiments, the ABE is ABE8e-m or ABE8e-d. ABE8e shows efficient adenine base editing activity and low indel formation when used with Cas homologues other than SpCas9, for example, SaCas9, SaCas9-KKH, Cas12a homologues, e.g., LbCas12a, enAs-Cas12a, SpCas9-NG and circularly permuted CP1028-SpCas9 and CP1041-SpCas9. In addition to the mutations shown for ABE8e in Table 12, off-target RNA and DNA editing were reduced by introducing a V106W substitution into the TadA domain (as described in M. Richter et al., 2020, Nature Biotechnology, doi.org/10.1038/s4i587-020-0453-z, the entire contents of which are incorporated by reference herein).

TABLE 12
Additional Adenosine Base Editor 8 Variants. In the table, “monomer”
indicates an ABE comprising a single TadA*7.10 comprising the indicated alterations
and “heterodimer” indicates an ABE comprising a TadA*7.10 comprising the indicated
alterations fused to an E. coli TadA adenosine deaminase.

| ABE8 Base | Adenosine | |
|---|---|---|
| Editor | Deaminase | Adenosine Deaminase Description |
| ABE8a-m | TadA*8a | Monomer_TadA*7.10 + R26C + A109S + T111R + D119N + |
| | | H122N + Y147D + F149Y + T166I + D167N |
| ABE8b-m | TadA*8b | Monomer_TadA*7.10 + V88A + A109S + T111R + D119N + |
| | | H122N + F149Y + T166I + D167N |
| ABE8c-m | TadA*8c | Monomer_TadA*7.10 + R26C + A109S + T111R + D119N + |
| | | H122N + F149Y + T166I + D167N |
| ABE8d-m | TadA*8d | Monomer_TadA*7.10 + V88A + T111R + D119N + F149Y |
| ABE8e-m | TadA*8e | Monomer_TadA*7.10 + A109S + T111R + D119N + H122N + |
| | | Y147D + F149Y + T166I + D167N |
| ABE8a-d | TadA*8a | Heterodimer_(WT) + (TadA*7.10 + R26C + A109S + T111R + |
| | | D119N + H122N + Y147D + F149Y + T166I + D167N) |
| ABE8b-d | TadA*8b | Heterodimer_(WT) + (TadA*7.10 + V88A + A109S + T111R + |
| | | D119N + H122N + F149Y + T166I + D167N) |
| ABE8c-d | TadA*8c | Heterodimer_(WT) + (TadA*7.10 + R26C + A109S + T111R + |
| | | D119N + H122N + F149Y + T166I + D167N) |
| ABE8d-d | TadA*8d | Heterodimer_(WT) + (TadA*7.10 + V88A + T111R + D119N + |
| | | F149Y) |
| ABE8e-d | TadA*8e | Heterodimer_(WT) + (TadA*7.10 + A109S + T111R + D119N + |
| | | H122N + Y147D + F149Y + T166I + D167N) |

[0883] In some embodiments, base editors (e.g., ABE8) are generated by cloning an PP194 adenosine deaminase variant (e.g., TadA*8) into a scaffold that includes a circular permutant Cas9 (e.g., CP5 or CP6) and a bipartite nuclear localization sequence. In some embodiments, the base editor (e.g., ABE7.9, ABE7.10, or ABE8) is an NGC PAM CP5 variant (S. pyogenes Cas9 or spVRQR Cas9). In some embodiments, the base editor (e.g., ABE7.9, ABE7.10, or ABE8) is an AGA PAM CP5 variant (S. pyogenes Cas9 or spVRQR Cas9). In some embodiments, the base editor (e.g, ABE7.9, ABE7.10, or ABE8) is an NGC PAM CP6 variant (S. pyogenes Cas9 or spVRQR Cas9). In some embodiments, the base editor (e.g. ABE7.9, ABET.10, or ABE8) is an AGA PAM CP6 variant (S. pyogenes Cas9 or spVRQR Cas9).

[0884] In some embodiments, the ABE has a genotype as shown in Table 13 below.

TABLE 13
Genotypes of ABEs

| | | | | | | | | | | | | | | | | | | | | | |
|---|---|---|---|---|---|---|---|---|---|---|---|---|---|---|---|---|---|---|---|---|---|
| 23 | 26 | 36 | 37 | 48 | 49 | 51 | 172 | 84 | 87 | 105 | 108 | 123 | 125 | 142 | 145 | 147 | 152 | 155 | 156 | 157 | 161 |

| | | | | | | | | | | | | | | | | | | | | | |
|---|---|---|---|---|---|---|---|---|---|---|---|---|---|---|---|---|---|---|---|---|---|
| ABE7.9 | L | R | L | N | A | L | N | F | S | V | N | Y | G | N | C | Y | P | V | F | N | K |
| ABE7.10 | R | R | L | N | A | L | N | F | S | V | N | Y | G | A | C | Y | P | V | F | N | K |

[0885] As shown in Table 14 below, genotypes of 40 ABE8s are described. Residue positions in the evolved E. coli TadA portion of ABE are indicated. Mutational changes in ABE8 are shown when distinct from ABE7.10 mutations. In some embodiments, the ABE has a genotype of one of the ABEs as shown in Table 14 below.

TABLE 14
Residue Identity in Evolved TadA

| | 23 | 36 | 48 | 51 | 76 | 82 | 84 | 106 | 108 | 123 | 146 | 147 | 152 | 154 | 155 | 156 | 157 | 166 |
|---|---|---|---|---|---|---|---|---|---|---|---|---|---|---|---|---|---|---|
| ABE7.10 | R | L | A | L | I | V | F | V | N | Y | C | Y | P | Q | V | F | N | T |
| ABE8.1-m | | | | | | | | | | | | T | | | | | | |
| ABE8.2-m | | | | | | | | | | | | R | | | | | | |
| ABE8.3-m | | | | | | | | | | | | | | S | | | | |
| ABE8.4-m | | | | | | | | | | H | | | | | | | | |
| ABE8.5-m | | | | | | S | | | | | | | | | | | | |
| ABE8.6-m | | | | | | | | | | | | | | | | | | R |
| ABE8.7-m | | | | | | | | | | | | | | R | | | | |
| ABE8.8-m | | | | | | | | | | H | | R | | R | | | | |
| ABE8.9-m | | | | | Y | | | | | | | R | | R | | | | |
| ABE8.10-m | | | | | | | | | | | | R | | R | | | | R |
| ABE8.11-m | | | | | | | | | | | | T | | R | | | | |
| ABE8.12-m | | | | | | | | | | | | T | | S | | | | |
| ABE8.13-m | | | | | Y | | | | | H | | R | | R | | | | |
| ABE8.14-m | | | | | Y | S | | | | | | | | | | | | |
| ABE8.15-m | | | | | | S | | | | | | R | | | | | | |
| ABE8.16-m | | | | | | S | | | | H | | R | | | | | | |
| ABE8.17-m | | | | | | S | | | | | | | | R | | | | |
| ABE8.18-m | | | | | | S | | | | H | | | | R | | | | |
| ABE8.19-m | | | | | | S | | | | H | | R | | R | | | | |
| ABE8.20-m | | | | | Y | S | | | | H | | R | | R | | | | |
| ABE8.21-m | | | | | | | | | | | | R | | S | | | | |
| ABE8.22-m | | | | | | S | | | | | | | | S | | | | |
| ABE8.23-m | | | | | | S | | | | H | | | | | | | | |
| ABE8.24-m | | | | | | S | | | | H | | T | | | | | | |
| ABE8.1-d | | | | | | | | | | | | T | | | | | | |
| ABE8.2-d | | | | | | | | | | | | R | | | | | | |
| ABE8.3-d | | | | | | | | | | | | | | S | | | | |
| ABE8.4-d | | | | | | | | | | H | | | | | | | | |
| ABE8.5-d | | | | | | S | | | | | | | | | | | | |
| ABE8.6-d | | | | | | | | | | | | | | | | | | R |
| ABE8.7-d | | | | | | | | | | | | | | R | | | | |
| ABE8.8-d | | | | | | | | | | H | | R | | R | | | | |
| ABE8.9-d | | | | | Y | | | | | | | R | | R | | | | |
| ABE8.10-d | | | | | | | | | | | | R | | R | | | | R |
| ABE8.11-d | | | | | | | | | | | | T | | R | | | | |
| ABE8.12-d | | | | | | | | | | | | T | | S | | | | |
| ABE8.13-d | | | | | Y | | | | | H | | R | | R | | | | |
| ABE8.14-d | | | | | Y | S | | | | | | | | | | | | |
| ABE8.15-d | | | | | | S | | | | | | R | | | | | | |
| ABE8.16-d | | | | | | S | | | | H | | R | | | | | | |
| ABE8.17-d | | | | | | S | | | | | | | | R | | | | |
| ABE8.18-d | | | | | | S | | | | H | | | | R | | | | |
| ABE8.19-d | | | | | | S | | | | H | | R | | R | | | | |
| ABE8.20-d | | | | | Y | S | | | | H | | R | | R | | | | |
| ABE8.21-d | | | | | | | | | | | | R | | S | | | | |
| ABE8.22-d | | | | | | S | | | | | | | | S | | | | |
| ABE8.23-d | | | | | | S | | | | H | | | | | | | | |
| ABE8.24-d | | | | | | S | | | | H | | T | | | | | | |

[0886] In some embodiments, the base editor is ABE8.1, which comprises or consists essentially of the following sequence or a fragment thereof having adenosine deaminase activity:

ABE8.1_Y147T_CP5_NGC PAM_monomer
(SEQ ID NO: 331)
MSEVEFSHEYWMRHALTLAKRARDEREVPVGA
VLVLNNRVIGEGWNRAIGLHDPTAHAEIMALR
QGGLVMQNYRLIDATLYVTFEPCVMCAGAMIH
SRIGRVVFGVRNAKTGAAGSLMDVLHYPGMNH
RVEITEGILADECAALLCTFFRMPRQVFNAQK
KAQSSTD
SGGSSGGSSGSETPGTSESATPESSGGSSGGS
EIGKATAKYFFYSNIMNFFKTEITLANGEIRK
RPLIETNGETGEIVWDKGRDFATVRKVLSMPQ
VNIVKKTEVQTGGFSKESILPKRNSDKLIARK
KDWDPKKYGGFMQPTVAYSVLVVAKVEKGKSK
KLKSVKELLGITIMERSSFEKNPIDFLEAKGY
KEVKKDLIIKLPKYSLFELENGRKRMLASAKF
LQKGNELALPSKYVNFLYLASHYEKLKGSPED
NEQKQLFVEQHKHYLDEIIEQISEFSKRVILA
DANLDKVLSAYNKHRDKPIREQAENIIHLFTL
TNLGAPRAFKYFDTTIARKEYRSTKEVLDATL
IHQSITGLYETRIDLSQLGGD
GGSGGSGGSGGSGGSGGSGGM
DKKYSIGLAIGTNSVGWAVITDEYKVPSKKFK
VLGNTDRHSIKKNLIGALLFDSGETAEATRLK
RTARRRYTRRKNRICYLQEIFSNEMAKVDDSF
FHRLEESFLVEEDKKHERHPIFGNIVDEVAYH
EKYPTIYHLRKKLVDSTDKADLRLIYLALAHM
IKFRGHFLIEGDLNPDNSDVDKLFIQLVQTYN
QLFEENPINASGVDAKAILSARLSKSRRLENL
IAQLPGEKKNGLFGNLIALSLGLTPNFKSNFD
LAEDAKLQLSKDTYDDDLDNLLAQIGDQYADL
FLAAKNLSDAILLSDILRVNTEITKAPLSASM
IKRYDEHHQDLTLLKALVRQQLPEKYKEIFFD
QSKNGYAGYIDGGASQEEFYKFIKPILEKMDG
TEELLVKLNREDLLRKQRTFDNGSIPHQIHLG
ELHAILRRQEDFYPFLKDNREKIEKILTFRIP
YYVGPLARGNSRFAWMTRKSEETITPWNFEEV
VDKGASAQSFIERMTNFDKNLPNEKVLPKHSL
LYEYFTVYNELTKVKYVTEGMRKPAFLSGEQK
KAIVDLLFKTNRKVTVKQLKEDYFKKIECFDS
VEISGVEDRFNASLGTYHDLLKIIKDKDFLDN
EENEDILEDIVLTLTLFEDREMIEERLKTYAH
LFDDKVMKQLKRRRYTGWGRLSRKLINGIRDK
QSGKTILDFLKSDGFANRNFMQLIHDDSLTFK
EDIQKAQVSGQGDSLHEHIANLAGSPAIKKGI
LQTVKVVDELVKVMGRHKPENIVIEMARENQT
TQKGQKNSRERMKRIEEGIKELGSQILKEHPV
ENTQLQNEKLYLYYLQNGRDMYVDQELDINRL
SDYDVDHIVPQSFLKDDSIDNKVLTRSDKNRG
KSDNVPSEEVVKKMKNYWRQLLNAKLITQRKF
DNLTKAERGGLSELDKAGFIKRQLVETRQITK
HVAQILDSRMNTKYDENDKLIREVKVITLKSK
LVSDFRKDFQFYKVREINNYHHAHDAYLNAVV
GTALIKKYPKLESEFVYGDYKVYDVRKMIAKS
EQEGADKRTADGSEFESPKKKRKV

[0887] In the above sequence, the plain text denotes an adenosine deaminase sequence, bold sequence indicates sequence derived from Cas9, the italicized sequence denotes a linker sequence, and the underlined sequence denotes a bipartite nuclear localization sequence. Other ABE8 sequences are provided in the attached sequence listing (SEQ ID NOs: 332-354).

[0888] In some embodiments, the base editor is a ninth generation ABE (ABE9). In some embodiments, the ABE9 contains a TadA*9 variant. ABE9 base editors include an adenosine deaminase variant comprising an amino acid sequence, which contains alterations relative to an ABE 7*10 reference sequence, as described herein. Exemplary ABE9 variants are listed in Table 15. Details of ABE9 base editors are described in International PCT Application No. PCT/US2020/049975, which is incorporated herein by reference for its entirety.

TABLE 15
Adenosine Base Editor 9 (ABE9) Variants. In the table, “monomer”
indicates an ABE comprising a single TadA*7.10 comprising the indicated alterations
and “heterodimer” indicates an ABE comprising a TadA*7.10 comprising the indicated
alterations fused to an E. coli TadA adenosine deaminase.

| ABE9 Description | Alterations |
|---|---|
| ABE9.1_monomer | E25F, V82S, Y123H, T133K, Y147R, Q154R |
| ABE9.2_monomer | E25F, V82S, Y123H, Y147R, Q154R |
| ABE9.3_monomer | V82S, Y123H, P124W, Y147R, Q154R |
| ABE9.4_monomer | L51W, V82S, Y123H, C146R, Y147R, Q154R |
| ABE9.5_monomer | P54C, V82S, Y123H, Y147R, Q154R |
| ABE9.6_monomer | Y73S, V82S, Y123H, Y147R, Q154R |
| ABE9.7_monomer | N38G, V82T, Y123H, Y147R, Q154R |
| ABE9.8_monomer | R23H, V82S, Y123H, Y147R, Q154R |
| ABE9.9_monomer | R21N, V82S, Y123H, Y147R, Q154R |
| ABE9.10_monomer | V82S, Y123H, Y147R, Q154R, A158K |
| ABE9.11_monomer | N72K, V82S, Y123H, D139L, Y147R, Q154R, |
| ABE9.12_monomer | E25F, V82S, Y123H, D139M, Y147R, Q154R |
| ABE9.13_monomer | M70V, V82S, M94V, Y123H, Y147R, Q154R |
| ABE9.14_monomer | Q71M, V82S, Y123H, Y147R, Q154R |
| ABE9.15_heterodimer | E25F, V82S, Y123H, T133K, Y147R, Q154R |
| ABE9.16_heterodimer | E25F, V82S, Y123H, Y147R, Q154R |
| ABE9.17_heterodimer | V82S, Y123H, P124W, Y147R, Q154R |
| ABE9.18_heterodimer | L51W, V82S, Y123H, C146R, Y147R, Q154R |
| ABE9.19_heterodimer | P54C, V82S, Y123H, Y147R, Q154R |
| ABE9.2_heterodimer | Y73S, V82S, Y123H, Y147R, Q154R |
| ABE9.21_heterodimer | N38G, V82T, Y123H, Y147R, Q154R |
| ABE9.22_heterodimer | R23H, V82S, Y123H, Y147R, Q154R |
| ABE9.23_heterodimer | R21N, V82S, Y123H, Y147R, Q154R |
| ABE9.24_heterodimer | V82S, Y123H, Y147R, Q154R, A158K |
| ABE9.25_heterodimer | N72K, V82S, Y123H, D139L, Y147R, Q154R, |
| ABE9.26_heterodimer | E25F, V82S, Y123H, D139M, Y147R, Q154R |
| ABE9.27_heterodimer | M70V, V82S, M94V, Y123H, Y147R, Q154R |
| ABE9.28_heterodimer | Q71M, V82S, Y123H, Y147R, Q154R |
| ABE9.29_monomer | E25F_I76Y_V82S_Y123H_Y147R_Q154R |
| ABE9.30_monomer | I76Y_V82T_Y123H_Y147R_Q154R |
| ABE9.31_monomer | N38G_I76Y_V82S_Y123H_Y147R_Q154R |
| ABE9.32_monomer | N38G_I76Y_V82T_Y123H_Y147R_Q154R |
| ABE9.33_monomer | R23H_I76Y V82S_Y123H_Y147R_Q154R |
| ABE9.34_monomer | P54C_I76Y V82S_Y123H_Y147R_Q154R |
| ABE9.35_monomer | R21N_I76Y V82S_Y123H_Y147R_Q154R |
| ABE9.36_monomer | I76Y_V82S Y123H_D138M_Y147R_Q154R |
| ABE9.37_monomer | Y72S_I76Y_V82S_Y123H_Y147R_Q154R |
| ABE9.38_heterodimer | E25F_I76Y_V82S_Y123H_Y147R_Q154R |
| ABE9.39_heterodimer | I76Y_V82T Y123H Y147R_Q154R |
| ABE9.40_heterodimer | N38G_I76Y_V82S_Y123H_Y147R_Q154R |
| ABE9.41_heterodimer | N38G_I76Y_V82T_Y123H_Y147R_Q154R |
| ABE9.42_heterodimer | R23H_I76Y_V82S_Y123H_Y147R_Q154R |
| ABE9.43_heterodimer | P54C_I76Y_V82S_Y123H_Y147R_Q154R |
| ABE9.44_heterodimer | R21N_I76Y_V82S_Y123H_Y147R_Q154R |
| ABE9.45_heterodimer | I76Y_V82S_Y123H_D138M_Y147R_Q154R |
| ABE9.46_heterodimer | Y72S_I76Y_V82S_Y123H_Y147R_Q154R |
| ABE9.47_monomer | N72K_V82S, Y123H, Y147R, Q154R |
| ABE9.48_monomer | Q71M_V82S, Y123H, Y147R, Q154R |
| ABE9.49_monomer | M70V, V82S, M94V, Y123H, Y147R, Q154R |
| ABE9.50_monomer | V82S, Y123H, T133K, Y147R, Q154R |
| ABE9.51_monomer | V82S, Y123H, T133K, Y147R, Q154R, |
| | A158K |
| ABE9.52_monomer | M70V, Q71M, N72K, V82S, Y123H, Y147R, |
| | Q154R |
| ABE9.53_heterodimer | N72K_V82S, Y123H, Y147R, Q154R |
| ABE9.54_heterodimer | Q71M_V82S, Y123H, Y147R, Q154R |
| ABE9.55_heterodimer | M70V, V82S, M94V, Y123H, Y147R, Q154R |
| ABE9.56_heterodimer | V82S, Y123H, T133K, Y147R, Q154R |
| ABE9.57_heterodimer | V82S, Y123H, T133K, Y147R, Q154R, |
| | A158K |
| ABE9.58_heterodimer | M70V, Q71M, N72K, V82S, Y123H, Y147R, |
| | Q154R |

[0889] In some embodiments, the base editor includes an adenosine deaminase variant comprising an amino acid sequence, which contains alterations relative to an ABE 7*10 reference sequence, as described herein. The term “monomer” as used in Table 15.1 refers to a monomeric form of TadA*7.10 comprising the alterations described. The term “heterodimer” as used in Table 15.1 refers to the specified wild-type E. coli TadA adenosine deaminase fused to a TadA*7.10 comprising the alterations as described.

TABLE 15.1
Adenosine Deaminase Base Editor Variants

| | Adenosine | |
|---|---|---|
| ABE | Deaminase | Adenosine Deaminase Description |
| ABE-605m | MSP605 | monomer_TadA*7.10 + V82G + Y147T + Q154S |
| ABE-680m | MSP680 | monomer_TadA*7.10 + I76Y + V82G + Y147T + Q154S |
| ABE-823m | MSP823 | monomer_TadA*7.10 + L36H + V82G + Y147T + Q154S + |
| | | N157K |
| ABE-824m | MSP824 | monomer_TadA*7.10 + V82G + Y147D + F149Y + Q154S + |
| | | D167N |
| ABE-825m | MSP825 | monomer_TadA*7.10 + L36H + V82G + Y147D + F149Y + |
| | | Q154S + N157K + D167N |
| ABE-827m | MSP827 | monomer_TadA*7.10 + L36H + I76Y + V82G + Y147T + Q154S + |
| | | N157K |
| ABE-828m | MSP828 | monomer_TadA*7.10 + I76Y + V82G + Y147D + F149Y + Q154S + |
| | | D167N |
| ABE-829m | MSP829 | monomer_TadA*7.10 + L36H + I76Y + V82G + Y147D + F149Y + |
| | | Q154S + N157K + D167N |
| ABE-605d | MSP605 | heterodimer_(WT) + (TadA*7.10 + V82G + Y147T + Q154S) |
| ABE-680d | MSP680 | heterodimer_(WT) + (TadA*7.10 + I76Y + V82G + Y147T + |
| | | Q154S) |
| ABE-823d | MSP823 | heterodimer_(WT) + (TadA*7.10 + L36H + V82G + Y147T + |
| | | Q154S + N157K) |
| ABE-824d | MSP824 | heterodimer_(WT) + (TadA*7.10 + V82G + Y147D + F149Y + |
| | | Q154S + D167N) |
| ABE-825d | MSP825 | heterodimer_(WT) + (TadA*7.10 + L36H + V82G + Y147D + |
| | | F149Y + Q154S + N157K + D167N) |
| ABE-827d | MSP827 | heterodimer_(WT) + (TadA*7.10 + L36H + I76Y + V82G + Y147T + |
| | | Q154S + N157K) |
| ABE-828d | MSP828 | heterodimer_(WT) + (TadA*7.10 + I76Y + V82G + Y147D + |
| | | F149Y + Q154S + D167N) |
| ABE-829d | MSP829 | heterodimer_(WT) + (TadA*7.10 + L36H + I76Y + V82G + Y147D + |
| | | F149Y + Q154S + N157K + D167N) |

[0890] In some embodiments, the base editor comprises a domain comprising all or a portion (e.g., a functional portion) of a uracil glycosylase inhibitor (UGI) or a uracil stabilizing protein (USP) domain. In some embodiments, the base editor comprises a domain comprising all or a portion of a nucleic acid polymerase. In some embodiments, a base editor can comprise as a domain all or a portion (e.g., a functional portion) of a nucleic acid polymerase (NAP). For example, a base editor comprises all or a portion (e.g., a functional portion) of a eukaryotic NAP. In some embodiments, a NAP or portion (e.g., a functional portion) thereof incorporated into a base editor is a DNA polymerase. In some embodiments, a NAP or portion thereof incorporated into a base editor has translesion polymerase activity. In some embodiments, a NAP or portion thereof incorporated into a base editor is a translesion DNA polymerase. In some embodiments, a NAP or portion thereof incorporated into a base editor is a Rev7, Rev1 complex, polymerase iota, polymerase kappa, or polymerase eta. In some embodiments, a NAP or portion thereof incorporated into a base editor is a eukaryotic polymerase alpha, beta, gamma, delta, epsilon, gamma, eta, iota, kappa, lambda, mu, or nu component. In some embodiments, a NAP or portion thereof incorporated into a base editor comprises an amino acid sequence that is at least 75%, 80%, 85%, 90%, 95%, 96%, 97%, 98%, 99%, or 99.5% identical to a nucleic acid polymerase (e.g., a translesion DNA polymerase). In some embodiments, a nucleic acid polymerase or portion thereof incorporated into a base editor is a translesion DNA polymerase.

[0891] In some embodiments, a domain of the base editor comprises multiple domains. For example, the base editor comprising a polynucleotide programmable nucleotide binding domain derived from Cas9 can comprise a REC lobe and an NUC lobe corresponding to the REC lobe and NUC lobe of a wild-type or natural Cas9. In another example, the base editor can comprise one or more of a RuvCI domain, BH domain, REC1 domain, REC2 domain, RuvCII domain, L1 domain, HNH domain, L2 domain, RuvCIII domain, WED domain, TOPO domain or CTD domain. In some embodiments, one or more domains of the base editor comprise a mutation (e.g., substitution, insertion, deletion) relative to a wild-type version of a polypeptide comprising the domain. For example, an HNH domain of a polynucleotide programmable DNA binding domain can comprise an H840A substitution. In another example, a RuvCI domain of a polynucleotide programmable DNA binding domain can comprise a D10A substitution.

[0892] Different domains (e.g., adjacent domains) of the base editor disclosed herein can be connected to each other with or without the use of one or more linker domains (e.g., an XTEN linker domain). In some embodiments, a linker domain can be a bond (e.g., covalent bond), chemical group, or a molecule linking two molecules or moieties, e.g., two domains of a fusion protein, such as, for example, a first domain (e.g., Cas9-derived domain) and a second domain (e.g., an adenosine deaminase domain or a cytidine deaminase domain). In some embodiments, a linker is a covalent bond (e.g., a carbon-carbon bond, disulfide bond, carbon-hetero atom bond, etc.). In certain embodiments, a linker is a carbon nitrogen bond of an amide linkage. In certain embodiments, a linker is a cyclic or acyclic, substituted or unsubstituted, branched or unbranched aliphatic or heteroaliphatic linker. In certain embodiments, a linker is polymeric (e.g., polyethylene, polyethylene glycol, polyamide, polyester, etc.). In certain embodiments, a linker comprises a monomer, dimer, or polymer of aminoalkanoic acid. In some embodiments, a linker comprises an aminoalkanoic acid (e.g. glycine, ethanoic acid, alanine, beta-alanine, 3-aminopropanoic acid, 4-aminobutanoic acid, 5-pentanoic acid, etc.). In some embodiments, a linker comprises a monomer, dimer, or polymer of aminohexanoic acid (Ahx). In certain embodiments, a linker is based on a carbocyclic moiety (e.g., cyclopentane, cyclohexane). In other embodiments, a linker comprises a polyethylene glycol moiety (PEG). In certain embodiments, a linker comprises an aryl or heteroaryl moiety. In certain embodiments, the linker is based on a phenyl ring. A linker can include functionalized moieties to facilitate attachment of a nucleophile (e.g., thiol, amino) from the peptide to the linker. Any electrophile can be used as part of the linker. Exemplary electrophiles include, but are not limited to, activated esters, activated amides, Michael acceptors, alkyl halides, aryl halides, acyl halides, and isothiocyanates. In some embodiments, a linker joins a gRNA binding domain of an RNA-programmable nuclease, including a Cas9 nuclease domain, and the catalytic domain of a nucleic acid editing protein. In some embodiments, a linker joins a dCas9 and a second domain (e.g., UGI, etc.).

### Linkers

[0893] In certain embodiments, linkers may be used to link any of the peptides or peptide domains of the present disclosure. The linker may be as simple as a covalent bond, or it may be a polymeric linker many atoms in length. In certain embodiments, the linker is a polypeptide or based on amino acids. In other embodiments, the linker is not peptide-like. In certain embodiments, the linker is a covalent bond (e.g., a carbon-carbon bond, disulfide bond, carbon-heteroatom bond, etc.). In certain embodiments, the linker is a carbon-nitrogen bond of an amide linkage. In certain embodiments, the linker is a cyclic or acyclic, substituted or unsubstituted, branched or unbranched aliphatic or heteroaliphatic linker. In certain embodiments, the linker is polymeric (e.g., polyethylene, polyethylene glycol, polyamide, polyester, etc.). In certain embodiments, the linker comprises a monomer, dimer, or polymer of aminoalkanoic acid. In certain embodiments, the linker comprises an aminoalkanoic acid (e.g., glycine, ethanoic acid, alanine, beta-alanine, 3-aminopropanoic acid, 4-aminobutanoic acid, 5-pentanoic acid, etc.). In certain embodiments, the linker comprises a monomer, dimer, or polymer of aminohexanoic acid (Ahx). In certain embodiments, the linker is based on a carbocyclic moiety (e.g., cyclopentane, cyclohexane). In other embodiments, the linker comprises a polyethylene glycol moiety (PEG). In other embodiments, the linker comprises amino acids. In certain embodiments, the linker comprises a peptide. In certain embodiments, the linker comprises an aryl or heteroaryl moiety. In certain embodiments, the linker is based on a phenyl ring. The linker may include functionalized moieties to facilitate attachment of a nucleophile (e.g., thiol, amino) from the peptide to the linker. Any electrophile may be used as part of the linker. Exemplary electrophiles include, but are not limited to, activated esters, activated amides, Michael acceptors, alkyl halides, aryl halides, acyl halides, and isothiocyanates.

[0894] Typically, a linker is positioned between, or flanked by, two groups, molecules, or other moieties and connected to each one via a covalent bond, thus connecting the two. In some embodiments, a linker is an amino acid or a plurality of amino acids (e.g., a peptide or protein). In some embodiments, a linker is an organic molecule, group, polymer, or chemical moiety. In some embodiments, a linker is 2-100 amino acids in length, for example, 2, 3, 4, 5, 6, 7, 8, 9, 10, 11, 12, 13, 14, 15, 16, 17, 18, 19, 20, 21, 22, 23, 24, 25, 26, 27, 28, 29, 30, 30-35, 35-40, 40-45, 45-50, 50-60, 60-70, 70-80, 80-90, 90-100, 100-150, or 150-200 amino acids in length. In some embodiments, the linker is about 3 to about 104 (e.g., 5, 6, 7, 8, 9, 10, 11, 12, 13, 14, 15, 16, 17, 18, 19, 20, 21, 22, 23, 24, 25, 26, 27, 28, 29, 30, 31, 32, 33, 34, 35, 36, 37, 38, 39, 40, 41, 42, 43, 44, 45, 46, 47, 48, 49, 50, 55, 60, 65, 70, 75, 80, 85, 90, 95, or 100) amino acids in length. Longer or shorter linkers are also contemplated.

[0895] In some embodiments, any of the fusion proteins provided herein, comprise a cytidine or adenosine deaminase and a Cas9 domain that are fused to each other via a linker. Various linker lengths and flexibilities between the cytidine or adenosine deaminase and the Cas9 domain can be employed (e.g., ranging from very flexible linkers of the form (GGGS)ₙ (SEQ ID NO: 246), (GGGGS)ₙ (SEQ ID NO: 247), and (G)ₙ to more rigid linkers of the form (EAAAK)ₙ (SEQ ID NO: 248), (SGGS)ₙ (SEQ ID NO: 355), SGSETPGTSESATPES (SEQ ID NO: 249) (see, e.g., Guilinger J P, et al. Fusion of catalytically inactive Cas9 to FokI nuclease improves the specificity of genome modification. Nat. Biotechnol. 2014; 32(6): 577-82; the entire contents are incorporated herein by reference) and (XP)ₙ) in order to achieve the optimal length for activity for the cytidine or adenosine deaminase nucleobase editor. In some embodiments, n is 1, 2, 3, 4, 5, 6, 7, 8, 9, 10, 11, 12, 13, 14, or 15. In some embodiments, the linker comprises a (GGS)ₙ motif, wherein n is 1, 3, or 7. In some embodiments, cytidine deaminase or adenosine deaminase and the Cas9 domain of any of the fusion proteins provided herein are fused via a linker comprising the amino acid sequence SGSETPGTSESATPES (SEQ ID NO: 249), which can also be referred to as the XTEN linker.

[0896] In some embodiments, the domains of the base editor are fused via a linker that comprises the amino acid sequence of:

(SEQ ID NO: 356)
SGGSSGSETPGTSESATPESSGGS,
(SEQ ID NO: 357)
SGGSSGGSSGSETPGTSESATPESSGGSSGGS,
or
(SEQ ID NO: 358)
GGSGGSPGSPAGSPTSTEEGTSESATPESGPGTSTEPSEGSAPGSPAGSP
TSTEEGTSTEPSEGSAPGTSTEPSEGSAPGTSESATPESGPGSEPATSGG
SGGS.

[0897] In some embodiments, domains of the base editor are fused via a linker comprising the amino acid sequence SGSETPGTSESATPES (SEQ ID NO: 249), which may also be referred to as the XTEN linker. In some embodiments, a linker comprises the amino acid sequence SGGS. In some embodiments, the linker is 24 amino acids in length. In some embodiments, the linker comprises the amino acid sequence SGGSSGGSSGSETPGTSESATPES (SEQ ID NO: 359). In some embodiments, the linker is 40 amino acids in length. In some embodiments, the linker comprises the amino acid sequence:

(SEQ ID NO: 360)
SGGSSGGSSGSETPGTSESATPESSGGSSGGSSGGSSGGS.

[0898] In some embodiments, the linker is 64 amino acids in length. In some embodiments, the linker comprises the amino acid sequence: SGGSSGGSSGSETPGTSESATPESSGGSSGGSSGGSSGGSSGSETPGTSESATPESSGGSSG GS (SEQ ID NO: 361). In some embodiments, the linker is 92 amino acids in length. In some embodiments, the linker comprises the amino acid sequence:

(SEQ ID NO: 362)
PGSPAGSPTSTEEGTSESATPESGPGTSTEPSEGSAPGSPAGSPTSTEEG
TSTEPSEGSAPGTSTEPSEGSAPGTSESATPESGPGSEPATS.

[0899] In some embodiments, a linker comprises a plurality of proline residues and is 5-21, 5-14, 5-9, 5-7 amino acids in length, e.g., PAPAP (SEQ ID NO: 363), PAPAPA (SEQ ID NO: 364), PAPAPAP (SEQ ID NO: 365), PAPAPAPA (SEQ ID NO: 366), P (AP) 4 (SEQ ID NO: 367), P (AP) 7 (SEQ ID NO: 368), P (AP) 10 (SEQ ID NO: 369) (see, e.g., Tan J, Zhang F, Karcher D, Bock R. Engineering of high-precision base editors for site-specific single nucleotide replacement. Nat Commun. 2019 Jan. 25; 10(1):439; the entire contents are incorporated herein by reference). Such proline-rich linkers are also termed “rigid” linkers.

[0900] In another embodiment, the base editor system comprises a component (protein) that interacts non-covalently with a deaminase (DNA deaminase), e.g., an adenosine or a cytidine deaminase, and transiently attracts the adenosine or cytidine deaminase to the target nucleobase in a target polynucleotide sequence for specific editing, with minimal or reduced bystander or target-adjacent effects. Such anon-covalent system and method involving deaminase-interacting proteins serves to attract a DNA deaminase to a particular genomic target nucleobase and decouples the events of on-target and target-adjacent editing, thus enhancing the achievement of more precise single base substitution mutations. In an embodiment, the deaminase-interacting protein binds to the deaminase (e.g., adenosine deaminase or cytidine deaminase) without blocking or interfering with the active (catalytic) site of the deaminase from engaging the target nucleobase (e.g., adenosine or cytidine, respectively). Such as system, termed “MagnEdit,” involves interacting proteins tethered to a Cas9 and gRNA complex and can attract a co-expressed adenosine or cytidine deaminase (either exogenous or endogenous) to edit a specific genomic target site, and is described in McCann, J. et al., 2020, “MagnEdit—interacting factors that recruit DNA-editing enzymes to single base targets,” Life-Science-Alliance, Vol. 3, No. 4 (e201900606), (doi 10.26508/Isa.201900606), the contents of which are incorporated by reference herein in their entirety. In an embodiment, the DNA deaminase is an adenosine deaminase variant (e.g., TadA*8) as described herein.

[0901] In another embodiment, a system called “Suntag,” involves non-covalently interacting components used for recruiting protein (e.g., adenosine deaminase or cytidine deaminase) components, or multiple copies thereof, of base editors to polynucleotide target sites to achieve base editing at the site with reduced adjacent target editing, for example, as described in Tanenbaum, M. E. et al., “A protein tagging system for signal amplification in gene expression and fluorescence imaging,” Cell. 2014 October 23; 159(3): 635-646. doi:10.1016/j.cell.2014.09.039; and in Huang, Y.-H. et al., 2017, “DNA epigenome editing using CRISPR-Cas SunTag-directed DNMT3A,” Genome Biol 18: 176. doi:10.1186/s13059-017-1306-z, the contents of each of which are incorporated by reference herein in their entirety. In an embodiment, the DNA deaminase is an adenosine deaminase variant (e.g., TadA*8) as described herein.

Nucleic Acid Programmable DNA Binding Proteins with Guide RNAs

[0902] Provided herein are compositions and methods for base editing in cells (e.g., immune cells (e.g., T- or NK-cells). Further provided herein are compositions comprising a guide polynucleic acid sequence, e.g. a guide RNA sequence, or a combination of 2, 3, 4, 5, 6, 7, 8, 9, 10, 11, 12, 13, 14, 15, 16, 17, 18, 19, 20, or more guide RNAs as provided herein. In some embodiments, a composition for base editing as provided herein further comprises a polynucleotide that encodes a base editor, e.g. a C-base editor or an A-base editor. For example, a composition for base editing may comprise a mRNA sequence encoding a BE, a BE4, an ABE, and a combination of one or more guide RNAs as provided. A composition for base editing may comprise a base editor polypeptide and a combination of one or more of any guide RNAs provided herein. Such a composition may be used to effect base editing in an immune cell (e.g., T- or NK-cell) through different delivery approaches, for example, electroporation, nucleofection, viral transduction or transfection. In some embodiments, the composition for base editing comprises an mRNA sequence that encodes a base editor and a combination of one or more guide RNA sequences provided herein for electroporation.

[0903] Some aspects of this disclosure provide systems comprising any of the fusion proteins or complexes provided herein, and a guide RNA bound to a nucleic acid programmable DNA binding protein (napDNAbp) domain (e.g., a Cas9 (e.g., a dCas9, a nuclease active Cas9, or a Cas9 nickase) or Cas12) of the fusion protein or complex. These complexes are also termed ribonucleoproteins (RNPs). In some embodiments, the guide nucleic acid (e.g., guide RNA) is from 15-100 nucleotides long and comprises a sequence of at least 10 contiguous nucleotides that is complementary to a target sequence. In some embodiments, the guide RNA is 15, 16, 17, 18, 19, 20, 21, 22, 23, 24, 25, 26, 27, 28, 29, 30, 31, 32, 33, 34, 35, 36, 37, 38, 39, 40, 41, 42, 43, 44, 45, 46, 47, 48, 49, or 50 nucleotides long. In some embodiments, the guide RNA comprises a sequence of 15, 16, 17, 18, 19, 20, 21, 22, 23, 24, 25, 26, 27, 28, 29, 30, 31, 32, 33, 34, 35, 36, 37, 38, 39, or 40 contiguous nucleotides that is complementary to a target sequence. In some embodiments, the target sequence is a DNA sequence. In some embodiments, the target sequence is an RNA sequence. In some embodiments, the target sequence is a sequence in the genome of a mammal. In some embodiments, the target sequence is a sequence in the genome of a human. In some embodiments, the 3′ end of the target sequence is immediately adjacent to a canonical PAM sequence (NGG). In some embodiments, the 3′ end of the target sequence is immediately adjacent to a non-canonical PAM sequence (e.g., a sequence listed in Table 6 or 5′-NAA-3′). In some embodiments, the guide nucleic acid (e.g., guide RNA) is complementary to a sequence in a gene of interest (e.g., a gene associated with a disease or disorder).

[0904] Some aspects of this disclosure provide methods of using the fusion proteins, or complexes provided herein. For example, some aspects of this disclosure provide methods comprising contacting a DNA molecule with any of the fusion proteins or complexes provided herein, and with at least one guide RNA, wherein the guide RNA is about 15-100 nucleotides long and comprises a sequence of at least 10 contiguous nucleotides that is complementary to a target sequence. In some embodiments, the 3′ end of the target sequence is immediately adjacent to an AGC, GAG, TTT, GTG, or CAA sequence. In some embodiments, the 3′ end of the target sequence is immediately adjacent to an NGA, NGCG, NGN, NNGRRT, NNNRRT, NGCG, NGCN, NGTN, NGTN, NGTN, or 5′ (TTTV) sequence. In some embodiments, the 3′ end of the target sequence is immediately adjacent to an e.g., TTN, DTTN, GTTN, ATTN, ATTC, DTTNT, WTTN, HATY, TTTN, TTTV, TTTC, TG, RTR, or YTN PAM site.

[0905] It will be understood that the numbering of the specific positions or residues in the respective sequences depends on the particular protein and numbering scheme used. Numbering might differ, e.g., in precursors of a mature protein and the mature protein itself, and differences in sequences from species to species may affect numbering. One of skill in the art will be able to identify the respective residue in any homologous protein and in the respective encoding nucleic acid by methods well known in the art, e.g., by sequence alignment and determination of homologous residues.

[0906] It will be apparent to those of skill in the art that in order to target any of the fusion proteins or complexes disclosed herein, to a target site, e.g., a site comprising a mutation to be edited, it is typically necessary to co-express the fusion protein or complex together with a guide RNA. As explained in more detail elsewhere herein, a guide RNA typically comprises a tracrRNA framework allowing for napDNAbp (e.g., Cas9 or Cas12) binding, and a guide sequence, which confers sequence specificity to the napDNAbp:nucleic acid editing enzyme/domain fusion protein or complex. Alternatively, the guide RNA and tracrRNA may be provided separately, as two nucleic acid molecules. In some embodiments, the guide RNA comprises a structure, wherein the guide sequence comprises a sequence that is complementary to the target sequence. The guide sequence is typically 20 nucleotides long. The sequences of suitable guide RNAs for targeting napDNAbp:nucleic acid editing enzyme/domain fusion proteins or complexes to specific genomic target sites will be apparent to those of skill in the art based on the instant disclosure. Such suitable guide RNA sequences typically comprise guide sequences that are complementary to a nucleic sequence within 50 nucleotides upstream or downstream of the target nucleotide to be edited. Some exemplary guide RNA sequences suitable for targeting any of the provided fusion proteins or complexes to specific target sequences are provided herein.

[0907] Distinct portions of sgRNA are predicted to form various features that interact with Cas9 (e.g., SpyCas9) and/or the DNA target. Six conserved modules have been identified within native crRNA:tracrRNA duplexes and single guide RNAs (sgRNAs) that direct Cas9 endonuclease activity (see Briner et al., Guide RNA Functional Modules Direct Cas9 Activity and Orthogonality Mol Cell. 2014 Oct. 23; 56(2):333-339). The six modules include the spacer responsible for DNA targeting, the upper stem, bulge, lower stem formed by the CRISPR repeat:tracrRNA duplex, the nexus, and hairpins from the 3′ end of the tracrRNA. The upper and lower stems interact with Cas9 mainly through sequence-independent interactions with the phosphate backbone. In some embodiments, the upper stem is dispensable. In some embodiments, the conserved uracil nucleotide sequence at the base of the lower stem is dispensable. The bulge participates in specific side-chain interactions with the Rec domain of Cas9. The nucleobase of U44 interacts with the side chains of Tyr 325 and His 328, while G43 interacts with Tyr 329. The nexus forms the core of the sgRNA:Cas9 interactions and lies at the intersection between the sgRNA and both Cas9 and the target DNA. The nucleobases of A51 and A52 interact with the side chain of Phe 1105; U56 interacts with Arg 457 and Asn 459; the nucleobase of U59 inserts into a hydrophobic pocket defined by side chains of Arg 74, Asn 77, Pro 475, Leu 455, Phe 446, and Ile 448; C60 interacts with Leu 455, Ala 456, and Asn 459, and C61 interacts with the side chain of Arg 70, which in turn interacts with C15. In some embodiments, one or more of these mutations are made in the bulge and/or the nexus of a sgRNA for a Cas9 (e.g., spyCas9) to optimize sgRNA:Cas9 interactions.

[0908] Moreover, the tracrRNA nexus and hairpins are critical for Cas9 pairing and can be swapped to cross orthogonality barriers separating disparate Cas9 proteins, which is instrumental for further harnessing of orthogonal Cas9 proteins. In some embodiments, the nexus and hairpins are swapped to target orthogonal Cas9 proteins. In some embodiments, a sgRNA is dispensed of the upper stem, hairpin 1, and/or the sequence flexibility of the lower stem to design a guide RNA that is more compact and conformationally stable. In some embodiments, the modules are modified to optimize multiplex editing using a single Cas9 with various chimeric guides or by concurrently using orthogonal systems with different combinations of chimeric sgRNAs. Details regarding guide functional modules and methods thereof are described, for example, in Briner et al., Guide RNA Functional Modules Direct Cas9 Activity and Orthogonality Mol Cell. 2014 Oct. 23; 56(2):333-339, the contents of which is incorporated by reference herein in its entirety.

[0909] The domains of the base editor disclosed herein can be arranged in any order. Non-limiting examples of a base editor comprising a fusion protein comprising e.g., a polynucleotide-programmable nucleotide-binding domain (e.g., Cas9 or Cas12) and a deaminase domain (e.g., cytidine or adenosine deaminase) can be arranged as follows:
[0910] NH2-[nucleobase editing domain]-Linker1-[nucleobase editing domain]-COOH;
[0911] NH2-[deaminase]-Linker1-[nucleobase editing domain]-COOH;
[0912] NH2-[deaminase]-Linker1-[nucleobase editing domain]-Linker2-[UGI]—COOH;
[0913] NH2-[deaminase]-Linker1-[nucleobase editing domain]-COOH;
[0914] NH2-[adenosine deaminase]-Linker1-[nucleobase editing domain]-COOH;
[0915] NH2-[nucleobase editing domain]-[deaminase]-COOH;
[0916] NH2-[deaminase]-[nucleobase editing domain]-[inosine BER inhibitor]-COOH;
[0917] NH2-[deaminase]-[inosine BER inhibitor]-[nucleobase editing domain]-COOH;
[0918] NH2-[inosine BER inhibitor]-[deaminase]-[nucleobase editing domain]-COOH;
[0919] NH2-[nucleobase editing domain]-[deaminase]-[inosine BER inhibitor]-COOH;
[0920] NH2-[nucleobase editing domain]-[inosine BER inhibitor]-[deaminase]-COOH;
[0921] NH2-[inosine BER inhibitor]-[nucleobase editing domain]-[deaminase]-COOH;
[0922] NH2-[nucleobase editing domain]-Linker1-[deaminase]-Linker2-[nucleobase editing domain]-COOH;
[0923] NH2-[nucleobase editing domain]-Linker1-[deaminase]-[nucleobase editing domain]-COOH;
[0924] NH2-[nucleobase editing domain]-[deaminase]-Linker2-[nucleobase editing domain]-COOH;
[0925] NH2-[nucleobase editing domain]-[deaminase]-[nucleobase editing domain]-COOH;
[0926] NH2-[nucleobase editing domain]-Linker1-[deaminase]-Linker2-[nucleobase editing domain]-[inosine BER inhibitor]-COOH;
[0927] NH2-[nucleobase editing domain]-Linker1-[deaminase]-[nucleobase editing domain]-[inosine BER inhibitor]-COOH;
[0928] NH2-[nucleobase editing domain]-[deaminase]-Linker2-[nucleobase editing domain]-[inosine BER inhibitor]-COOH;
[0929] NH2-[nucleobase editing domain]-[deaminase]-[nucleobase editing domain]-[inosine BER inhibitor]-COOH;
[0930] NH2-[inosine BER inhibitor]-[nucleobase editing domain]-Linker1-[deaminase]-Linker2-[nucleobase editing domain]-COOH;
[0931] NH2-[inosine BER inhibitor]-[nucleobase editing domain]-Linker1-[deaminase]-[nucleobase editing domain]-COOH;
[0932] NH2-[inosine BER inhibitor]-[nucleobase editing domain]-[deaminase]-Linker2-[nucleobase editing domain]-COOH; or
[0933] NH2-[inosine BER inhibitor]NH2-[nucleobase editing domain]-[deaminase]-[nucleobase editing domain]-COOH.

[0934] In some embodiments, the base editing fusion proteins or complexes provided herein need to be positioned at a precise location, for example, where a target base is placed within a defined region (e.g., a “deamination window”). In some embodiments, a target can be within a 4-base region. In some embodiments, such a defined target region can be approximately 15 bases upstream of the PAM. See Komor, A. C., et al., “Programmable editing of a target base in genomic DNA without double-stranded DNA cleavage” Nature 533, 420-424 (2016); Gaudelli, N. M., et al., “Programmable base editing of A·T to G·C in genomic DNA without DNA cleavage” Nature 551, 464-471 (2017); and Komor, A. C., et al., “Improved base excision repair inhibition and bacteriophage Mu Gam protein yields C:G-to-T:A base editors with higher efficiency and product purity” Science Advances 3:eaao4774 (2017), the entire contents of which are hereby incorporated by reference.

[0935] A defined target region can be a deamination window. A deamination window can be the defined region in which a base editor acts upon and deaminates a target nucleotide. In some embodiments, the deamination window is within a 2, 3, 4, 5, 6, 7, 8, 9, or 10 base regions. In some embodiments, the deamination window is 5, 6, 7, 8, 9, 10, 11, 12, 13, 14, 15, 16, 17, 18, 19, 20, 21, 22, 23, 24, or 25 bases upstream of the PAM.

[0936] The base editors of the present disclosure can comprise any domain, feature or amino acid sequence which facilitates the editing of a target polynucleotide sequence. For example, in some embodiments, the base editor comprises a nuclear localization sequence (NLS). In some embodiments, an NLS of the base editor is localized between a deaminase domain and a napDNAbp domain. In some embodiments, an NLS of the base editor is localized C-terminal to a napDNAbp domain.

[0937] Non-limiting examples of protein domains which can be included in the fusion protein or complexes include a deaminase domain (e.g., adenosine deaminase or cytidine deaminase), a uracil glycosylase inhibitor (UGI) domain, epitope tags, reporter gene sequences, and/or protein domains having one or more of the activities described herein.

[0938] A domain may be detected or labeled with an epitope tag, a reporter protein, other binding domains. Non-limiting examples of epitope tags include histidine (His) tags, V5 tags, FLAG tags, influenza hemagglutinin (HA) tags, Myc tags, VSV-G tags, and thioredoxin (Trx) tags. Examples of reporter genes include, but are not limited to, glutathione-5-transferase (GST), horseradish peroxidase (HRP), chloramphenicol acetyltransferase (CAT) beta-galactosidase, beta-glucuronidase, luciferase, green fluorescent protein (GFP), HcRed, DsRed, cyan fluorescent protein (CFP), yellow fluorescent protein (YFP), and autofluorescent proteins including blue fluorescent protein (BFP). Additional protein sequences can include amino acid sequences that bind DNA molecules or bind other cellular molecules, including but not limited to maltose binding protein (MBP), S-tag, Lex A DNA binding domain (DBD) fusions, GAL4 DNA binding domain fusions, and herpes simplex virus (HSV) BP16 protein fusions.

### Methods of Using Fusion Proteins or Complexes Comprising a Cytidine or Adenosine Deaminase and a Cas9 Domain

[0939] Some aspects of this disclosure provide methods of using the fusion proteins, or complexes provided herein. For example, some aspects of this disclosure provide methods comprising contacting a DNA molecule with any of the fusion proteins or complexes provided herein, and with at least one guide RNA described herein.

[0940] In some embodiments, a fusion protein or complex of the present disclosure is used for editing a target gene or polynucleotide sequence of interest. In particular, a cytidine deaminase or adenosine deaminase nucleobase editor described herein is capable of making multiple mutations within a target sequence. These mutations may affect the function of the target. For example, when a cytidine deaminase or adenosine deaminase nucleobase editor is used to target a regulatory region the function of the regulatory region is altered and the expression of the downstream protein is reduced or eliminated.

[0941] It will be understood that the numbering of the specific positions or residues in the respective sequences depends on the particular protein and numbering scheme used. Numbering might be different, e.g., in precursors of a mature protein and the mature protein itself, and differences in sequences from species to species may affect numbering. One of skill in the art will be able to identify the respective residue in any homologous protein and in the respective encoding nucleic acid by methods well known in the art, e.g., by sequence alignment and determination of homologous residues.

[0942] It will be apparent to those of skill in the art that in order to target any of the fusion proteins or complexes comprising a Cas9 domain and a cytidine or adenosine deaminase, as disclosed herein, to a target site, e.g., a site comprising a mutation to be edited, it is typically necessary to co-express the fusion protein or complex together with a guide RNA, e.g., an sgRNA. As explained in more detail elsewhere herein, a guide RNA typically comprises a tracrRNA framework allowing for Cas9 binding, and a guide sequence, which confers sequence specificity to the Cas9:nucleic acid editing enzyme/domain fusion protein or complex. Alternatively, the guide RNA and tracrRNA may be provided separately, as two nucleic acid molecules. In some embodiments, the guide RNA comprises a structure, wherein the guide sequence comprises a sequence that is complementary to the target sequence. The guide sequence is typically 20 nucleotides long. The sequences of suitable guide RNAs for targeting Cas9:nucleic acid editing enzyme/domain fusion proteins or complexes to specific genomic target sites will be apparent to those of skill in the art based on the instant disclosure. Such suitable guide RNA sequences typically comprise guide sequences that are complementary to a nucleic sequence within 50 nucleotides upstream or downstream of the target nucleotide to be edited. Some exemplary guide RNA sequences suitable for targeting any of the provided fusion proteins or complexes to specific target sequences are provided herein.

### Base Editor Efficiency

[0943] In some embodiments, the purpose of the methods provided herein is to alter a gene and/or gene product via gene editing. The nucleobase editing proteins provided herein can be used for gene editing-based human therapeutics in vitro or in vivo. It will be understood by the skilled artisan that the nucleobase editing proteins provided herein, e.g., the fusion proteins or complexes comprising a polynucleotide programmable nucleotide binding domain (e.g., Cas9) and a nucleobase editing domain (e.g., an adenosine deaminase domain or a cytidine deaminase domain) can be used to edit a nucleotide from A to G or C to T.

[0944] Advantageously, base editing systems as provided herein provide genome editing without generating double-strand DNA breaks, without requiring a donor DNA template, and without inducing an excess of stochastic insertions and deletions as CRISPR may do. In some embodiments, the present disclosure provides base editors that efficiently generate an intended mutation, such as a STOP codon, in a nucleic acid (e.g., a nucleic acid within a genome of a subject) without generating a significant number of unintended mutations, such as unintended point mutations. In some embodiments, an intended mutation is a mutation that is generated by a specific base editor (e.g., adenosine base editor or cytidine base editor) bound to a guide polynucleotide (e.g., gRNA), specifically designed to generate the intended mutation. In some embodiments, the intended mutation is in a gene associated with a target antigen associated with a disease or disorder. In some embodiments, the intended mutation is an adenine (A) to guanine (G) point mutation (e.g., SNP) in a gene associated with a target antigen associated with a disease or disorder. In some embodiments, the intended mutation is an adenine (A) to guanine (G) point mutation within the coding region or non-coding region of a gene (e.g., regulatory region or element). In some embodiments, the intended mutation is a cytosine (C) to thymine (T) point mutation (e.g., SNP) in a gene associated with a target antigen associated with a disease or disorder. In some embodiments, the intended mutation is a cytosine (C) to thymine (T) point mutation within the coding region or non-coding region of a gene (e.g., regulatory region or element). In some embodiments, the intended mutation is a point mutation that generates a STOP codon, for example, a premature STOP codon within the coding region of a gene. In some embodiments, the intended mutation is a mutation that eliminates a stop codon.

[0945] The base editors of the present disclosure advantageously modify a specific nucleotide base encoding a protein without generating a significant proportion of indels. An “indel”, as used herein, refers to the insertion or deletion of a nucleotide base within a nucleic acid. Such insertions or deletions can lead to frame shift mutations within a coding region of a gene. In some embodiments, it is desirable to generate base editors that efficiently modify (e.g. mutate) a specific nucleotide within a nucleic acid, without generating a large number of insertions or deletions (i.e., indels) in the nucleic acid. In some embodiments, it is desirable to generate base editors that efficiently modify (e.g. mutate or methylate) a specific nucleotide within a nucleic acid, without generating a large number of insertions or deletions (i.e., indels) in the nucleic acid. In certain embodiments, any of the base editors provided herein can generate a greater proportion of intended modifications (e.g., methylations) versus indels. In certain embodiments, any of the base editors provided herein can generate a greater proportion of intended modifications (e.g., mutations) versus indels.

[0946] In some embodiments, the base editors provided herein are capable of generating a ratio of intended mutations to indels (i.e., intended point mutations:unintended point mutations) that is greater than 1:1. In some embodiments, the base editors provided herein are capable of generating a ratio of intended mutations to indels that is at least 1.5:1, at least 2:1, at least 2.5:1, at least 3:1, at least 3.5:1, at least 4:1, at least 4.5:1, at least 5:1, at least 5.5:1, at least 6:1, at least 6.5:1, at least 7:1, at least 7.5:1, at least 8:1, at least 10:1, at least 12:1, at least 15:1, at least 20:1, at least 25:1, at least 30:1, at least 40:1, at least 50:1, at least 100:1, at least 200:1, at least 300:1, at least 400:1, at least 500:1, at least 600:1, at least 700:1, at least 800:1, at least 900:1, or at least 1000:1, or more. The number of intended mutations and indels may be determined using any suitable method.

[0947] In some embodiments, the base editors provided herein can limit formation of indels in a region of a nucleic acid. In some embodiments, the region is at a nucleotide targeted by a base editor or a region within 2, 3, 4, 5, 6, 7, 8, 9, or 10 nucleotides of a nucleotide targeted by a base editor. In some embodiments, any of the base editors provided herein can limit the formation of indels at a region of a nucleic acid to less than 1%, less than 1.5%, less than 2%, less than 2.5%, less than 3%, less than 3.5%, less than 4%, less than 4.5%, less than 5%, less than 6%, less than 7%, less than 8%, less than 9%, less than 10%, less than 12%, less than 15%, or less than 20%. The number of indels formed at a nucleic acid region may depend on the amount of time a nucleic acid (e.g., a nucleic acid within the genome of a cell) is exposed to a base editor. In some embodiments, a number or proportion of indels is determined after at least 1 hour, at least 2 hours, at least 6 hours, at least 12 hours, at least 24 hours, at least 36 hours, at least 48 hours, at least 3 days, at least 4 days, at least 5 days, at least 7 days, at least 10 days, or at least 14 days of exposing a nucleic acid (e.g., a nucleic acid within the genome of a cell) to a base editor.

[0948] Some aspects of the disclosure are based on the recognition that any of the base editors provided herein are capable of efficiently generating an intended mutation in a nucleic acid (e.g. a nucleic acid within a genome of a subject) without generating a considerable number of unintended mutations (e.g., spurious off-target editing or bystander editing). In some embodiments, an intended mutation is a mutation that is generated by a specific base editor bound to a gRNA, specifically designed to generate the intended mutation. In some embodiments, the intended mutation is a mutation that generates a stop codon, for example, a premature stop codon within the coding region of a gene. In some embodiments, the intended mutation is a mutation that eliminates a stop codon. In some embodiments, the intended mutation is a mutation that alters the splicing of a gene. In some embodiments, the intended mutation is a mutation that alters the regulatory sequence of a gene (e.g., a gene promotor or gene repressor). In some embodiments, any of the base editors provided herein are capable of generating a ratio of intended mutations to unintended mutations (e.g. intended mutations:unintended mutations) that is greater than 1:1. In some embodiments, any of the base editors provided herein are capable of generating a ratio of intended mutations to unintended mutations that is at least 1.5:1, at least 2:1, at least 2.5:1, at least 3:1, at least 3.5:1, at least 4:1, at least 4.5:1, at least 5:1, at least 5.5:1, at least 6:1, at least 6.5:1, at least 7:1, at least 7.5:1, at least 8:1, at least 10:1, at least 12:1, at least 15:1, at least 20:1, at least 25:1, at least 30:1, at least 40:1, at least 50:1, at least 100:1, at least 150:1, at least 200:1, at least 250:1, at least 500:1, or at least 1000:1, or more. It should be appreciated that the characteristics of the base editors described herein may be applied to any of the fusion proteins or complexes, or methods of using the fusion proteins or complexes provided herein.

[0949] Base editing is often referred to as a “modification”, such as, a genetic modification, a gene modification and modification of the nucleic acid sequence and is clearly understandable based on the context that the modification is a base editing modification. A base editing modification is therefore a modification at the nucleotide base level, for example as a result of the deaminase activity discussed throughout the disclosure, which then results in a change in the gene sequence, and may affect the gene product. In essence therefore, the gene editing modification described herein may result in a modification of the gene, structurally and/or functionally, wherein the expression of the gene product may be modified, for example, the expression of the gene is knocked out; or conversely, enhanced, or, in some circumstances, the gene function or activity may be modified. Using the methods disclosed herein, a base editing efficiency may be determined as the knockdown efficiency of the gene in which the base editing is performed, wherein the base editing is intended to knockdown the expression of the gene. A knockdown level may be validated quantitatively by determining the expression level by any detection assay, such as assay for protein expression level, for example, by flow cytometry; assay for detecting RNA expression such as quantitative RT-PCR, northern blot analysis, or any other suitable assay such as pyrosequencing; and may be validated qualitatively by nucleotide sequencing reactions.

[0950] In some embodiments, the modification, e.g., single base edit results in at least 10% reduction of the gene targeted expression. In some embodiments, the base editing efficiency may result in at least 10% reduction of the gene targeted expression. In some embodiments, the base editing efficiency may result in at least 20% reduction of the gene targeted expression. In some embodiments, the base editing efficiency may result in at least 30% reduction of the gene targeted expression. In some embodiments, the base editing efficiency may result in at least 40% reduction of the gene targeted expression. In some embodiments, the base editing efficiency may result in at least 50% reduction of the gene targeted expression. In some embodiments, the base editing efficiency may result in at least 60% reduction of the targeted gene expression. In some embodiments, the base editing efficiency may result in at least 70% reduction of the targeted gene expression. In some embodiments, the base editing efficiency may result in at least 80% reduction of the targeted gene expression. In some embodiments, the base editing efficiency may result in at least 90% reduction of the targeted gene expression. In some embodiments, the base editing efficiency may result in at least 91% reduction of the targeted gene expression. In some embodiments, the base editing efficiency may result in at least 92% reduction of the targeted gene expression. In some embodiments, the base editing efficiency may result in at least 93% reduction of the targeted gene expression. In some embodiments, the base editing efficiency may result in at least 94% reduction of the targeted gene expression. In some embodiments, the base editing efficiency may result in at least 95% reduction of the targeted gene expression. In some embodiments, the base editing efficiency may result in at least 96% reduction of the targeted gene expression. In some embodiments, the base editing efficiency may result in at least 97% reduction of the targeted gene expression. In some embodiments, the base editing efficiency may result in at least 98% reduction of the targeted gene expression. In some embodiments, the base editing efficiency may result in at least 99% reduction of the targeted gene expression. In some embodiments, the base editing efficiency may result in knock-out (100% knockdown of the gene expression) of the gene that is targeted.

[0951] In some embodiments, any of the base editor systems provided herein result in less than 50%, less than 40%, less than 30%, less than 20%, less than 19%, less than 18%, less than 17%, less than 16%, less than 15%, less than 14%, less than 13%, less than 12%, less than 110, less than 10%, less than 9%, less than 8%, less than 7%, less than 6%, less than 5%, less than 4%, less than 3%, less than 2%, less than 1%, less than 0.9%, less than 0.8%, less than 0.7%, less than 0.6%, less than 0.5%, less than 0.4%, less than 0.3%, less than 0.2%, less than 0.1%, less than 0.09%, less than 0.08%, less than 0.07%, less than 0.06%, less than 0.05%, less than 0.04%, less than 0.03%, less than 0.02%, or less than 0.01% indel formation in the target polynucleotide sequence.

[0952] In some embodiments, targeted modifications, e.g., single base editing, are used simultaneously to target at least 4, 5, 6, 7, 8, 9, 10, 11, 12 13, 14, 15, 16, 17, 18, 19, 20, 21, 22, 23, 24, 25, 26, 27, 28, 29, 30, 31, 32, 33, 34, 35, 36, 37, 38, 39, 40, 41, 42, 43, 44, 45, 46, 47, 48, 49 or 50 different endogenous sequences for base editing with different guide RNAs. In some embodiments, targeted modifications, e.g. single base editing, are used to sequentially target at least 4, 5, 6, 7, 8, 9, 10, 11, 12 13, 14, 15, 16, 17, 18, 19, 20, 21, 22, 23, 24, 25, 26, 27, 28, 29, 30, 31, 32, 33, 34, 35, 36, 37, 38, 39, 40, 41, 42, 43, 44, 45, 46, 47, 48, 49 50, or more different endogenous gene sequences for base editing with different guide RNAs.

[0953] Some aspects of the disclosure are based on the recognition that any of the base editors provided herein are capable of efficiently generating an intended mutation, such as a point mutation, in a nucleic acid (e.g., a nucleic acid within a genome of a subject) without generating a significant number of unintended mutations, such as unintended point mutations (i.e., mutation of bystanders). In some embodiments, any of the base editors provided herein are capable of generating at least 0.01% of intended mutations (i.e., at least 0.01% base editing efficiency). In some embodiments, any of the base editors provided herein are capable of generating at least 0.01%, 1%, 2%, 3%, 4%, 5%, 10%, 15%, 20%, 25%, 30%, 40%, 45%, 50%, 60%, 70%, 80%, 90%, 95%, or 99% of intended mutations.

[0954] In some embodiments, any of the base editor systems comprising one of the ABE8 base editor variants described herein result in less than 50%, less than 40%, less than 30%, less than 20%, less than 19%, less than 18%, less than 17%, less than 16%, less than 15%, less than 14%, less than 13%, less than 12%, less than 11%, less than 10%, less than 9%, less than 8%, less than 7%, less than 6%, less than 5%, less than 4%, less than 3%, less than 2%, less than 1%, less than 0.9%, less than 0.8%, less than 0.7%, less than 0.6%, less than 0.5%, less than 0.4%, less than 0.3%, less than 0.2%, less than 0.1%, less than 0.09%, less than 0.08%, less than 0.07%, less than 0.06%, less than 0.05%, less than 0.04%, less than 0.03%, less than 0.02%, or less than 0.01% indel formation in the target polynucleotide sequence. In some embodiments, any of the base editor systems comprising one of the ABE8 base editor variants described herein result in less than 0.8% indel formation in the target polynucleotide sequence. In some embodiments, any of the base editor systems comprising one of the ABE8 base editor variants described herein result in at most 0.8% indel formation in the target polynucleotide sequence. In some embodiments, any of the base editor systems comprising one of the ABE8 base editor variants described herein result in less than 0.3% indel formation in the target polynucleotide sequence. In some embodiments, any of the base editor systems comprising one of the ABE8 base editor variants described results in lower indel formation in the target polynucleotide sequence compared to a base editor system comprising one of ABE7 base editors. In some embodiments, any of the base editor systems comprising one of the ABE8 base editor variants described herein results in lower indel formation in the target polynucleotide sequence compared to a base editor system comprising an ABE7.10.

[0955] In some embodiments, any of the base editor systems comprising one of the ABE8 base editor variants described herein has reduction in indel frequency compared to a base editor system comprising one of the ABE7 base editors. In some embodiments, any of the base editor systems comprising one of the ABE8 base editor variants described herein has at least 0.01%, at least 1%, at least 2%, at least 3%, at least 4%, at least 5%, at least 10%, at least 15%, at least 20%, at least 25%, at least 30%, at least 35%, at least 40%, at least 45%, at least 50%, at least 55%, at least 60%, at least 65%, at least 70%, at least 75%, at least 80%, at least 85%, at least 90%, or at least 95% reduction in indel frequency compared to a base editor system comprising one of the ABE7 base editors. In some embodiments, a base editor system comprising one of the ABE8 base editor variants described herein has at least 0.010%, at least 1%, at least 2%, at least 3%, at least 4%, at least 5%, at least 10%, at least 15%, at least 20%, at least 25%, at least 30%, at least 35%, at least 40%, at least 45%, at least 50%, at least 55%, at least 60%, at least 65%, at least 70%, at least 75%, at least 80%, at least 85%, at least 90%, or at least 95% reduction in indel frequency compared to a base editor system comprising an ABE7.10.

[0956] The present disclosure provides adenosine deaminase variants (e.g., ABE8 variants) that have increased efficiency and specificity. In particular, the adenosine deaminase variants described herein are more likely to edit a desired base within a polynucleotide, and are less likely to edit bases that are not intended to be altered (e.g., “bystanders”).

[0957] In some embodiments, any of the base editor systems provided herein result in less than 70%, less than 65%, less than 60%, less than 55%, 50%, less than 40%, less than 30%, less than 20%, less than 19%, less than 18%, less than 17%, less than 16%, less than 15%, less than 14%, less than 13%, less than 12%, less than 11%, less than 10%, less than 9%, less than 8%, less than 7%, less than 6%, less than 5%, less than 4%, less than 3%, less than 2%, less than 1%, less than 0.9%, less than 0.8%, less than 0.7%, less than 0.6%, less than 0.5%, less than 0.4%, less than 0.3%, less than 0.2%, less than 0.1%, less than 0.09%, less than 0.08%, less than 0.07%, less than 0.06%, less than 0.05%, less than 0.04%, less than 0.03%, less than 0.02%, or less than 0.01% bystander editing of one or more nucleotides (e.g., an off-target nucleotide).

[0958] In some embodiments, any of the base editing system comprising one of the ABE8 base editor variants described herein has reduced bystander editing or mutations. In some embodiments, an unintended editing or mutation is a bystander mutation or bystander editing, for example, base editing of a target base (e.g., A or C) in an unintended or non-target position in a target window of a target nucleotide sequence. In some embodiments, any of the base editing system comprising one of the ABE8 base editor variants described herein has reduced bystander editing or mutations compared to a base editor system comprising an ABE7 base editor, e.g., ABE7.10. In some embodiments, any of the base editing system comprising one of the ABE8 base editor variants described herein has reduced bystander editing or mutations by at least 1%, at least 2%, at least 3%, at least 4%, at least 5%, at least 10%, at least 15%, at least 20%, at least 25%, at least 30%, at least 35%, at least 40%, at least 45%, at least 50%, at least 55%, at least 60%, at least 65%, at least 70%, at least 75%, at least 80%, at least 85%, at least 90%, at least 95%, or at least 99% compared to a base editor system comprising an ABE7 base editor, e.g., ABE7.10. In some embodiments, any of the base editing system comprising one of the ABE8 base editor variants described herein has reduced bystander editing or mutations by at least 1.1 fold, at least 1.2 fold, at least 1.3 fold, at least 1.4 fold, at least 1.5 fold, at least 1.6 fold, at least 1.7 fold, at least 1.8 fold, at least 1.9 fold, at least 2.0 fold, at least 2.1 fold, at least 2.2 fold, at least 2.3 fold, at least 2.4 fold, at least 2.5 fold, at least 2.6 fold, at least 2.7 fold, at least 2.8 fold, at least 2.9 fold, or at least 3.0 fold compared to a base editor system comprising an ABE7 base editor, e.g., ABE7.10.

[0959] In some embodiments, any of the base editing system comprising one of the ABE8 base editor variants described herein has reduced spurious editing. In some embodiments, an unintended editing or mutation is a spurious mutation or spurious editing, for example, non-specific editing or guide independent editing of a target base (e.g., A or C) in an unintended or non-target region of the genome. In some embodiments, any of the base editing system comprising one of the ABE8 base editor variants described herein has reduced spurious editing compared to a base editor system comprising an ABE7 base editor, e.g., ABE7.10. In some embodiments, any of the base editing system comprising one of the ABE8 base editor variants described herein has reduced spurious editing by at least 1%, at least 2%, at least 3%, at least 4%, at least 5%, at least 10%, at least 15%, at least 20%, at least 25%, at least 30%, at least 35%, at least 40%, at least 45%, at least 50%, at least 55%, at least 60%, at least 65%, at least 70%, at least 75%, at least 80%, at least 85%, at least 90%, at least 95%, or at least 99% compared to a base editor system comprising an ABE7 base editor, e.g., ABE7.10. In some embodiments, any of the base editing system comprising one of the ABE8 base editor variants described herein has reduced spurious editing by at least 1.1 fold, at least 1.2 fold, at least 1.3 fold, at least 1.4 fold, at least 1.5 fold, at least 1.6 fold, at least 1.7 fold, at least 1.8 fold, at least 1.9 fold, at least 2.0 fold, at least 2.1 fold, at least 2.2 fold, at least 2.3 fold, at least 2.4 fold, at least 2.5 fold, at least 2.6 fold, at least 2.7 fold, at least 2.8 fold, at least 2.9 fold, or at least 3.0 fold compared to a base editor system comprising an ABE7 base editor, e.g., ABE7.10.

[0960] In some embodiments, any of the ABE8 base editor variants described herein have at least 0.01%, at least 1%, at least 2%, at least 3%, at least 4%, at least 5%, at least 10%, at least 15%, at least 20%, at least 25%, at least 30%, at least 35%, at least 40%, at least 45%, at least 50%, at least 55%, at least 60%, at least 65%, at least 70%, at least 75%, at least 80%, at least 85%, at least 90%, at least 95%, or at least 99% base editing efficiency. In some embodiments, the base editing efficiency may be measured by calculating the percentage of edited nucleobases in a population of cells. In some embodiments, any of the ABE8 base editor variants described herein have base editing efficiency of at least 0.01%, at least 1%, at least 2%, at least 3%, at least 4%, at least 5%, at least 10%, at least 15%, at least 20%, at least 25%, at least 30%, at least 35%, at least 40%, at least 45%, at least 50%, at least 55%, at least 60%, at least 65%, at least 70%, at least 75%, at least 80%, at least 85%, at least 90%, at least 95%, or at least 99% as measured by edited nucleobases in a population of cells.

[0961] In some embodiments, any of the ABE8 base editor variants described herein has higher base editing efficiency compared to the ABE7 base editors. In some embodiments, any of the ABE8 base editor variants described herein have at least 1%, at least 2%, at least 3%, at least 4%, at least 5%, at least 10%, at least 15%, at least 20%, at least 25%, at least 30%, at least 35%, at least 40%, at least 45%, at least 50%, at least 55%, at least 60%, at least 65%, at least 70%, at least 75%, at least 80%, at least 85%, at least 90%, at least 95%, at least 99%, at least 100%, at least 105%, at least 110%, at least 115%, at least 120%, at least 125%, at least 130%, at least 135%, at least 140%, at least 145%, at least 150%, at least 155%, at least 160%, at least 165%, at least 170%, at least 175%, at least 180%, at least 185%, at least 190%, at least 195%, at least 200%, at least 210%, at least 220%, at least 230%, at least 240%, at least 250%, at least 260%, at least 270%, at least 280%, at least 290%, at least 300%, at least 310%, at least 320%, at least 330%, at least 340%, at least 350%, at least 360%, at least 370%, at least 380%, at least 390%, at least 400%, at least 450%, or at least 500% higher base editing efficiency compared to an ABE7 base editor, e.g., ABE7.10.

[0962] In some embodiments, any of the ABE8 base editor variants described herein has at least 1.1 fold, at least 1.2 fold, at least 1.3 fold, at least 1.4 fold, at least 1.5 fold, at least 1.6 fold, at least 1.7 fold, at least 1.8 fold, at least 1.9 fold, at least 2.0 fold, at least 2.1 fold, at least 2.2 fold, at least 2.3 fold, at least 2.4 fold, at least 2.5 fold, at least 2.6 fold, at least 2.7 fold, at least 2.8 fold, at least 2.9 fold, at least 3.0 fold, at least 3.1 fold, at least 3.2, at least 3.3 fold, at least 3.4 fold, at least 3.5 fold, at least 3.6 fold, at least 3.7 fold, at least 3.8 fold, at least 3.9 fold, at least 4.0 fold, at least 4.1 fold, at least 4.2 fold, at least 4.3 fold, at least 4.4 fold, at least 4.5 fold, at least 4.6 fold, at least 4.7 fold, at least 4.8 fold, at least 4.9 fold, or at least 5.0 fold higher base editing efficiency compared to an ABE7 base editor, e.g., ABE7.10.

[0963] In some embodiments, any of the ABE8 base editor variants described herein have at least 0.01%, at least 1%, at least 2%, at least 3%, at least 4%, at least 5%, at least 10%, at least 15%, at least 20%, at least 25%, at least 30%, at least 35%, at least 40%, at least 45%, at least 50%, at least 55%, at least 60%, at least 65%, at least 70%, at least 75%, at least 80%, at least 85%, at least 90%, at least 95%, or at least 99% on-target base editing efficiency. In some embodiments, any of the ABE8 base editor variants described herein have on-target base editing efficiency of at least 0.01%, at least 1%, at least 2%, at least 3%, at least 4%, at least 5%, at least 10%, at least 15%, at least 20%, at least 25%, at least 30%, at least 35%, at least 40%, at least 45%, at least 50%, at least 55%, at least 60%, at least 65%, at least 70%, at least 75%, at least 80%, at least 85%, at least 90%, at least 95%, or at least 99% as measured by edited target nucleobases in a population of cells.

[0964] In some embodiments, any of the ABE8 base editor variants described herein has higher on-target base editing efficiency compared to the ABE7 base editors. In some embodiments, any of the ABE8 base editor variants described herein have at least 1%, at least 2%, at least 3%, at least 4%, at least 5%, at least 10%, at least 15%, at least 20%, at least 25%, at least 30%, at least 35%, at least 40%, at least 45%, at least 50%, at least 55%, at least 60%, at least 65%, at least 70%, at least 75%, at least 80%, at least 85%, at least 90%, at least 95%, at least 99%, at least 100%, at least 105%, at least 110%, at least 115%, at least 120%, at least 125%, at least 130%, at least 135%, at least 140%, at least 145%, at least 150%, at least 155%, at least 160%, at least 165%, at least 170%, at least 175%, at least 180%, at least 185%, at least 190%, at least 195%, at least 200%, at least 210%, at least 220%, at least 230%, at least 240%, at least 250%, at least 260%, at least 270%, at least 280%, at least 290%, at least 300%, at least 310%, at least 320%, at least 330%, at least 340%, at least 350%, at least 360%, at least 370%, at least 380%, at least 390%, at least 400%, at least 450%, or at least 500% higher on-target base editing efficiency compared to an ABE7 base editor, e.g., ABE7.10.

[0965] In some embodiments, any of the ABE8 base editor variants described herein has at least 1.1 fold, at least 1.2 fold, at least 1.3 fold, at least 1.4 fold, at least 1.5 fold, at least 1.6 fold, at least 1.7 fold, at least 1.8 fold, at least 1.9 fold, at least 2.0 fold, at least 2.1 fold, at least 2.2 fold, at least 2.3 fold, at least 2.4 fold, at least 2.5 fold, at least 2.6 fold, at least 2.7 fold, at least 2.8 fold, at least 2.9 fold, at least 3.0 fold, at least 3.1 fold, at least 3.2 fold, at least 3.3 fold, at least 3.4 fold, at least 3.5 fold, at least 3.6 fold, at least 3.7 fold, at least 3.8 fold, at least 3.9 fold, at least 4.0 fold, at least 4.1 fold, at least 4.2 fold, at least 4.3 fold, at least 4.4 fold, at least 4.5 fold, at least 4.6 fold, at least 4.7 fold, at least 4.8 fold, at least 4.9 fold, or at least 5.0 fold higher on-target base editing efficiency compared to an ABE7 base editor, e.g., ABE7.10.

[0966] The ABE8 base editor variants described herein may be delivered to a host cell via a plasmid, a vector, a LNP complex, or an mRNA. In some embodiments, any of the ABE8 base editor variants described herein is delivered to a host cell as an mRNA. In some embodiments, an ABE8 base editor delivered via a nucleic acid based delivery system, e.g., an mRNA, has on-target editing efficiency of at least at least 1%, at least 2%, at least 3%, at least 4%, at least 5%, at least 10%, at least 15%, at least 20%, at least 25%, at least 30%, at least 35%, at least 40%, at least 45%, at least 50%, at least 55%, at least 60%, at least 65%, at least 70%, at least 75%, at least 80%, at least 85%, at least 90%, at least 95%, or at least 99% as measured by edited nucleobases. In some embodiments, an ABE8 base editor delivered by an mRNA system has higher base editing efficiency compared to an ABE8 base editor delivered by a plasmid or vector system. In some embodiments, any of the ABE8 base editor variants described herein has at least 1%, at least 2%, at least 3%, at least 4%, at least 5%, at least 10%, at least 15%, at least 20%, at least 25%, at least 30%, at least 35%, at least 40%, at least 45%, at least 50%, at least 55%, at least 60%, at least 65%, at least 70%, at least 75%, at least 80%, at least 85%, at least 90%, at least 95%, at least 99%, at least 100%, at least 105%, at least 110%, at least 115%, at least 120%, at least 125%, at least 130%, at least 135%, at least 140%, at least 145%, at least 150%, at least 155%, at least 160%, at least 165%, at least 170%, at least 175%, at least 180%, at least 185%, at least 190%, at least 195%, at least 200%, at least 210%, at least 220%, at least 230%, at least 240%, at least 250%, at least 260%, at least 270%, at least 280%, at least 290%, at least 300% higher, at least 310%, at least 320%, at least 330%, at least 340%, at least 350%, at least 360%, at least 370%, at least 380%, at least 390%, at least 400%, at least 450%, or at least 500% on-target editing efficiency when delivered by an mRNA system compared to when delivered by a plasmid or vector system. In some embodiments, any of the ABE8 base editor variants described herein has at least 1.1 fold, at least 1.2 fold, at least 1.3 fold, at least 1.4 fold, at least 1.5 fold, at least 1.6 fold, at least 1.7 fold, at least 1.8 fold, at least 1.9 fold, at least 2.0 fold, at least 2.1 fold, at least 2.2 fold, at least 2.3 fold, at least 2.4 fold, at least 2.5 fold, at least 2.6 fold, at least 2.7 fold, at least 2.8 fold, at least 2.9 fold, at least 3.0 fold, at least 3.1 fold, at least 3.2 fold, at least 3.3 fold, at least 3.4 fold, at least 3.5 fold, at least 3.6 fold, at least 3.7 fold, at least 3.8 fold, at least 3.9 fold, at least 4.0 fold, at least 4.1 fold, at least 4.2 fold, at least 4.3 fold, at least 4.4 fold, at least 4.5 fold, at least 4.6 fold, at least 4.7 fold, at least 4.8 fold, at least 4.9 fold, or at least 5.0 fold higher on-target editing efficiency when delivered by an mRNA system compared to when delivered by a plasmid or vector system.

[0967] In some embodiments, any of the base editor systems comprising one of the ABE8 base editor variants described herein result in less than 50%, less than 40%, less than 30%, less than 20%, less than 19%, less than 18%, less than 17%, less than 16%, less than 15%, less than 14%, less than 13%, less than 12%, less than 11%, less than 10%, less than 9%, less than 8%, less than 7%, less than 6%, less than 5%, less than 4%, less than 3%, less than 2%, less than 1%, less than 0.9%, less than 0.8%, less than 0.7%, less than 0.6%, less than 0.5%, less than 0.4%, less than 0.3%, less than 0.2%, less than 0.1%, less than 0.09%, less than 0.08%, less than 0.07%, less than 0.06%, less than 0.05%, less than 0.04%, less than 0.03%, less than 0.02%, or less than 0.01% off-target editing in the target polynucleotide sequence.

[0968] In some embodiments, any of the ABE8 base editor variants described herein has lower guided off-target editing efficiency when delivered by an mRNA system compared to when delivered by a plasmid or vector system. In some embodiments, any of the ABE8 base editor variants described herein has at least 1%, at least 2%, at least 3%, at least 4%, at least 5%, at least 10%, at least 15%, at least 20%, at least 25%, at least 30%, at least 35%, at least 40%, at least 45%, at least 50%, at least 55%, at least 60%, at least 65%, at least 70%, at least 75%, at least 80%, at least 85%, at least 90%, at least 95%, or at least 99% lower guided off-target editing efficiency when delivered by an mRNA system compared to when delivered by a plasmid or vector system. In some embodiments, any of the ABE8 base editor variants described herein has at least 1.1 fold, at least 1.2 fold, at least 1.3 fold, at least 1.4 fold, at least 1.5 fold, at least 1.6 fold, at least 1.7 fold, at least 1.8 fold, at least 1.9 fold, at least 2.0 fold, at least 2.1 fold, at least 2.2 fold, at least 2.3 fold, at least 2.4 fold, at least 2.5 fold, at least 2.6 fold, at least 2.7 fold, at least 2.8 fold, at least 2.9 fold, or at least 3.0 fold lower guided off-target editing efficiency when delivered by an mRNA system compared to when delivered by a plasmid or vector system. In some embodiments, any of the ABE8 base editor variants described herein has at least about 2.2 fold decrease in guided off-target editing efficiency when delivered by an mRNA system compared to when delivered by a plasmid or vector system.

[0969] In some embodiments, any of the ABE8 base editor variants described herein has lower guide-independent off-target editing efficiency when delivered by an mRNA system compared to when delivered by a plasmid or vector system. In some embodiments, any of the ABE8 base editor variants described herein has at least 1%, at least 2%, at least 3%, at least 4%, at least 5%, at least 10%, at least 15%, at least 20%, at least 25%, at least 30%, at least 35%, at least 40%, at least 45%, at least 50%, at least 55%, at least 60%, at least 65%, at least 70%, at least 75%, at least 80%, at least 85%, at least 90%, at least 95%, or at least 99% lower guide-independent off-target editing efficiency when delivered by an mRNA system compared to when delivered by a plasmid or vector system. In some embodiments, any of the ABE8 base editor variants described herein has at least 1.1 fold, at least 1.2 fold, at least 1.3 fold, at least 1.4 fold, at least 1.5 fold, at least 1.6 fold, at least 1.7 fold, at least 1.8 fold, at least 1.9 fold, at least 2.0 fold, at least 2.1 fold, at least 2.2 fold, at least 2.3 fold, at least 2.4 fold, at least 2.5 fold, at least 2.6 fold, at least 2.7 fold, at least 2.8 fold, at least 2.9 fold, at least 3.0 fold, at least 5.0 fold, at least 10.0 fold, at least 20.0 fold, at least 50.0 fold, at least 70.0 fold, at least 100.0 fold, at least 120.0 fold, at least 130.0 fold, or at least 150.0 fold lower guide-independent off-target editing efficiency when delivered by an mRNA system compared to when delivered by a plasmid or vector system. In some embodiments, ABE8 base editor variants described herein has 134.0 fold decrease in guide-independent off-target editing efficiency (e.g., spurious RNA deamination) when delivered by an mRNA system compared to when delivered by a plasmid or vector system. In some embodiments, ABE8 base editor variants described herein does not increase guide-independent mutation rates across the genome.

[0970] In some embodiments, a single gene delivery event (e.g., by transduction, transfection, electroporation or any other method) can be used to target base editing of 5 sequences within a cell's genome. In some embodiments, a single gene delivery event can be used to target base editing of 6 sequences within a cell's genome. In some embodiments, a single gene delivery event can be used to target base editing of 7 sequences within a cell's genome. In some embodiments, a single electroporation event can be used to target base editing of 8 sequences within a cell's genome. In some embodiments, a single gene delivery event can be used to target base editing of 9 sequences within a cell's genome. In some embodiments, a single gene delivery event can be used to target base editing of 10 sequences within a cell's genome. In some embodiments, a single gene delivery event can be used to target base editing of 20 sequences within a cell's genome. In some embodiments, a single gene delivery event can be used to target base editing of 30 sequences within a cell's genome. In some embodiments, a single gene delivery event can be used to target base editing of 40 sequences within a cell's genome. In some embodiments, a single gene delivery event can be used to target base editing of 50 sequences within a cell's genome.

[0971] In some embodiments, the method described herein, for example, the base editing methods has minimum to no off-target effects. In some embodiments, the method described herein, for example, the base editing methods, has minimal to no chromosomal translocations.

[0972] In some embodiments, the base editing method described herein results in at least 50% of a cell population that have been successfully edited (i.e., cells that have been successfully engineered). In some embodiments, the base editing method described herein results in at least 55% of a cell population that have been successfully edited. In some embodiments, the base editing method described herein results in at least 60% of a cell population that have been successfully edited. In some embodiments, the base editing method described herein results in at least 65% of a cell population that have been successfully edited. In some embodiments, the base editing method described herein results in at least 70% of a cell population that have been successfully edited. In some embodiments, the base editing method described herein results in at least 75% of a cell population that have been successfully edited. In some embodiments, the base editing method described herein results in at least 80% of a cell population that have been successfully edited. In some embodiments, the base editing method described herein results in at least 85% of a cell population that have been successfully edited. In some embodiments, the base editing method described herein results in at least 90% of a cell population that have been successfully edited. In some embodiments, the base editing method described herein results in at least 95% of a cell population that have been successfully edited. In some embodiments, the base editing method described herein results in about 91%, 92%, 93%, 94%, 95%, 96%, 97%, 98%, 99% or 100% of a cell population that have been successfully edited.

[0973] In some embodiments, the percent of viable cells in a cell population following a base editing intervention is greater than at least 60%, 70%, 80%, or 90% of the starting cell population at the time of the base editing event. In some embodiments, the percent of viable cells in a cell population following editing is about 70%. In some embodiments, the percent of viable cells in a cell population following editing is about 75%. In some embodiments, the percent of viable cells in a cell population following editing is about 80%. In some embodiments, the percent of viable cells in a cell population as described above is about 85%. In some embodiments, the percent of viable cells in a cell population as described above is about 90%, or about 91%, 92%, 93%, 94% 95%, 96%, 97%, 98%, 99%, or 100% of the cells in the population at the time of the base editing event. In some embodiments, the engineered cell population can be further expanded in vitro by about 2 fold, about 3-fold, about 4-fold, about 5-fold, about 6-fold, about 7-fold, about 8-fold, about 9-fold, about 10-fold, about 15-fold, about 20-fold, about 25-fold, about 30-fold, about 35-fold, about 40-fold, about 45-fold, about 50-fold, or about 100-fold.

[0974] In embodiments, the cell population is a population of cells contacted with a base editor, complex, or base editor system of the present disclosure.

[0975] The number of intended mutations and indels can be determined using any suitable method, for example, as described in International PCT Application Nos. PCT/US2017/045381 (WO2018/027078) and PCT/US2016/058344 (WO2017/070632); Komor, A. C., et al., “Programmable editing of a target base in genomic DNA without double-stranded DNA cleavage” Nature 533, 420-424 (2016); Gaudelli, N. M., et al., “Programmable base editing of A·T to G·C in genomic DNA without DNA cleavage” Nature 551, 464-471 (2017); and Komor, A. C., et al., “Improved base excision repair inhibition and bacteriophage Mu Gam protein yields C:G-to-T:A base editors with higher efficiency and product purity” Science Advances 3:eaao4774 (2017); the entire contents of which are hereby incorporated by reference.

[0976] In some embodiments, to calculate indel frequencies, sequencing reads are scanned for exact matches to two 10-bp sequences that flank both sides of a window in which indels can occur. If no exact matches are located, the read is excluded from analysis. If the length of this indel window exactly matches the reference sequence the read is classified as not containing an indel. If the indel window is two or more bases longer or shorter than the reference sequence, then the sequencing read is classified as an insertion or deletion, respectively. In some embodiments, the base editors provided herein can limit formation of indels in a region of a nucleic acid. In some embodiments, the region is at a nucleotide targeted by a base editor or a region within 2, 3, 4, 5, 6, 7, 8, 9, or 10 nucleotides of a nucleotide targeted by a base editor.

[0977] The number of indels formed at a target nucleotide region can depend on the amount of time a nucleic acid (e.g., a nucleic acid within the genome of a cell) is exposed to a base editor. In some embodiments, the number or proportion of indels is determined after at least 1 hour, at least 2 hours, at least 6 hours, at least 12 hours, at least 24 hours, at least 36 hours, at least 48 hours, at least 3 days, at least 4 days, at least 5 days, at least 7 days, at least 10 days, or at least 14 days of exposing the target nucleotide sequence (e.g., a nucleic acid within the genome of a cell) to a base editor. It should be appreciated that the characteristics of the base editors as described herein can be applied to any of the fusion proteins or complexes, or methods of using the fusion proteins or complexes provided herein.

[0978] Details of base editor efficiency are described in International PCT Application Nos. PCT/US2017/045381 (WO 2018/027078) and PCT/US2016/058344 (WO 2017/070632), each of which is incorporated herein by reference for its entirety. Also see Komor, A. C., et al., “Programmable editing of a target base in genomic DNA without double-stranded DNA cleavage” Nature 533, 420-424 (2016); Gaudelli, N. M., et al., “Programmable base editing of A·T to G·C in genomic DNA without DNA cleavage” Nature 551, 464-471 (2017); and Komor, A. C., et al., “Improved base excision repair inhibition and bacteriophage Mu Gam protein yields C:G-to-T:A base editors with higher efficiency and product purity” Science Advances 3:eaao4774 (2017), the entire contents of which are hereby incorporated by reference. In some embodiments, editing of a plurality of nucleobase pairs in one or more genes using the methods provided herein results in formation of at least one intended mutation. In some embodiments, said formation of said at least one intended mutation results in the disruption the normal function of a gene. In some embodiments, said formation of said at least one intended mutation results decreases or eliminates the expression of a protein encoded by a gene. It should be appreciated that multiplex editing can be accomplished using any method or combination of methods provided herein.

### Multiplex Editing

[0979] In some embodiments, the base editor system provided herein is capable of multiplex editing of a plurality of nucleobase pairs in one or more PLC genes (e.g., β2M, TAP1, TAP2, Tapasin) and/or CD58, and/or regulatory elements thereof, in an immune cell (e.g., T- or NK-cell). In some embodiments, the base editor system provided herein is capable of multiplex editing of a plurality of nucleobase pairs in one or more additional gene sequences or regulatory element thereof (e.g., TRAC, CD58, CIITA) in an immune cell (e.g., T- or NK-cell). In some embodiments, the additional gene sequences or regulatory elements are selected from TCRα Chain (TRAC), Cluster of Differentiation 58 (CD58), and Class II, Major Histocompatibility Complex Transactivator (CIITA). In some embodiments, the base editor system provided herein is capable of multiplex editing of a plurality of nucleobase pairs in one or more of β2M, TAP1, TAP2, and/or Tapasin encoding genes in combination with one or more of TRAC, CD58, and/or CIITA encoding genes in an immune cell (e.g., T- or NK-cell). In some embodiments, the base editor system provided herein is capable of multiplex editing of a plurality of nucleobase pairs in one or more of Transporter Associated with Antigen Processing I (TAP1), Transporter Associated with Antigen Processing II (TAP2), Tapasin/TAP Binding Protein (TAPBP), TAP-Binding Protein-Like (TAPBPL), NLR family CARD domain containing 5 (NLRC5)/MHC class I transactivator (CITA), cluster of differentiation 155 (CD155), HLA-A, HLA-B, HLA-C, MHC class I polypeptide-related sequence A (MICA), MHC class I polypeptide-related sequence B (MICB) polypeptide, nectin cell adhesion molecule 2 (Nectin-2), UL16 binding protein 1-6 (ULBP), beta-2 microglobulin, CD48, CD58, Protein Disulfide Isomerase Family A Member 3 (PDIA3/ERp57), T Cell Receptor Alpha Constant polypeptides, HLA-A, HLA-B, HLA-C, TCRα Chain (TRAC), and Class II, Major Histocompatibility Complex Transactivator (CIITA) encoding genes. In some instances, the methods of the present disclosure involve knocking out expression of the following genes in an allogeneic immune cell, or a precursor thereof. CD5, B2M, CD3 gamma, CD3 epsilon, CIITA, and PD-1 (PD1).

[0980] In some instances, the methods of the present disclosure involve knocking out HLA-A, HLA-B, and CIITA expression in a cell. In some cases, the methods further involve knocking out expression of one or more of CD155, Nectin-2, CD48, MICA, MICB, and ULBP in the cell. The disclosure further provides cells modified according to the methods provided herein.

[0981] In some cases, the methods of the present disclosure involve knocking out an HLA-I peptide presentation pathway in a cell. In various instances, knocking out the HLA-I peptide presentation pathway involves knocking out expression of one or more genes listed herein (e.g., B2M, TAP1, etc.).

[0982] In some embodiments, cells with HLA-A and HLA-B expression knocked-out but with HLA-C expression not knocked out are prepared by sorting (e.g., using flow cytometry) a population of cells contacted with a base editing system (e.g., a base editing system containing the guide TSBTx4193 and/or TSBTx4194) of the disclosure for those cells surface-expressing HLA-C but not surface-expressing HLA-A or HLA-B. In some embodiments, cells with HLA-A and HLA-B expression knocked-out but with HLA-C expression not knocked out are prepared by identifying a donor having an HLA-C allele that is not knocked-out by a gRNA that knocks-out HLA-A and HLA-B expression (e.g., said HLA-C allele does not share a corresponding PAM sequence with the PAM sequence adjacent to the gRNA spacer sequence in the HLA-A and HLA-B alleles), and then contacting a population of cells from the donor with a base editing system of the disclosure comprising said gRNA.

[0983] In embodiments, the methods of the invention involve introducing one or more nucleobase alterations to a polynucleotide encoding an HLA-A polypeptide and to a polynucleotide encoding an HLA-B polypeptide. In embodiments, the methods of the invention involve introducing one or more nucleobase alterations to a polynucleotide encoding an HLA-A polypeptide and to a polynucleotide encoding an HLA-C polypeptide. In embodiments, the methods of the invention involve introducing one or more nucleobase alterations to a polynucleotide encoding an HLA-B polypeptide and to a polynucleotide encoding an HLA-C polypeptide. In embodiments, the alterations result in reduced or eliminated expression of the polypeptide (i.e., HLA-A, HLA-B, and/or HLA-C). In some cases, the methods of the invention involve knocking out or reducing expression of HLA-A and HLA-B expression in a cell, knocking out or reducing expression of HLA-A and HLA-C expression in a cell, and/or knocking out or reducing HLA-A and HLA-C expression in a cell. In various aspects, the invention of the disclosure features a cell comprising any one or more of the nucleobase alterations produced by the methods provided herein.

[0984] In some embodiments, the plurality of nucleobase pairs is located in the same gene or in one or more genes or polynucleotide sequences, wherein at least one gene is located in a different locus. In some embodiments, the multiplex editing comprises one or more guide polynucleotides. In some embodiments, the multiplex editing comprises one or more base editor systems. In some embodiments, the multiplex editing comprises one or more base editor systems with a single guide polynucleotide or a plurality of guide polynucleotides. In some embodiments, the multiplex editing comprises one or more guide polynucleotides with a single base editor system. In some embodiments, the multiplex editing comprises at least one guide polynucleotide that does or does not require a PAM sequence to target binding to a target polynucleotide sequence. In some embodiments, the multiplex editing comprises a mix of at least one guide polynucleotide that does not require a PAM sequence to target binding to a target polynucleotide sequence and at least one guide polynucleotide that require a PAM sequence to target binding to a target polynucleotide sequence. It should be appreciated that the characteristics of the multiplex editing using any of the base editors as described herein can be applied to any combination of methods using any base editor provided herein. It should also be appreciated that the multiplex editing using any of the base editors as described herein comprises a sequential editing of a plurality of nucleobase pairs.

[0985] In some embodiments, the plurality of nucleobase pairs are in one more genes or polynucleotide sequences. In some embodiments, the plurality of nucleobase pairs is in the same gene or polynucleotide sequence. In some embodiments, at least one gene in the one more genes is located in a different locus.

[0986] In some embodiments, the editing is editing of the plurality of nucleobase pairs in at least one protein coding region, in at least one protein non-coding region, or in at least one protein coding region and at least one protein non-coding region.

[0987] In some embodiments, the editing is in conjunction with one or more guide polynucleotides. In some embodiments, the base editor system comprises one or more base editor systems. In some embodiments, the base editor system comprises one or more base editor systems in conjunction with a single guide polynucleotide or a plurality of guide polynucleotides. In some embodiments, the editing is in conjunction with one or more guide polynucleotide with a single base editor system. In some embodiments, the editing is in conjunction with at least one guide polynucleotide that does not require a PAM sequence to target binding to a target polynucleotide sequence or with at least one guide polynucleotide that requires a PAM sequence to target binding to a target polynucleotide sequence, or with a mix of at least one guide polynucleotide that does not require a PAM sequence to target binding to a target polynucleotide sequence and at least one guide polynucleotide that does require a PAM sequence to target binding to a target polynucleotide sequence. It should be appreciated that the characteristics of the multiplex editing using any of the base editors as described herein can be applied to any of combination of the methods of using any of the base editors provided herein. It should also be appreciated that the editing can comprise a sequential editing of a plurality of nucleobase pairs.

[0988] In some embodiments, the base editor system capable of multiplex editing of a plurality of nucleobase pairs in one or more genes comprises one of ABE7, ABE8, and/or ABE9 base editors. In some embodiments, the base editor system capable of multiplex editing comprising one of the ABE8 base editor variants described herein has higher multiplex editing efficiency compared to the base editor system capable of multiplex editing comprising one of ABE7 base editors. In some embodiments, the base editor system capable of multiplex editing comprising one of the ABE8 base editor variants described herein has at least 1%, at least 2%, at least 3%, at least 4%, at least 5%, at least 10%, at least 15%, at least 20%, at least 25%, at least 30%, at least 35%, at least 40%, at least 45%, at least 50%, at least 55%, at least 60%, at least 65%, at least 70%, at least 75%, at least 80%, at least 85%, at least 90%, at least 95%, at least 99%, at least 100%, at least 105%, at least 110%, at least 115%, at least 120%, at least 125%, at least 130%, at least 135%, at least 140%, at least 145%, at least 150%, at least 155%, at least 160%, at least 165%, at least 170%, at least 175%, at least 180%, at least 185%, at least 190%, at least 195%, at least 200%, at least 210%, at least 220%, at least 230%, at least 240%, at least 250%, at least 260%, at least 270%, at least 280%, at least 290%, at least 300% higher, at least 310%, at least 320%, at least 330%, at least 340%, at least 350%, at least 360%, at least 370%, at least 380%, at least 390%, at least 400%, at least 450%, or at least 500% higher multiplex editing efficiency compared the base editor system capable of multiplex editing comprising one of ABE7 base editors. In some embodiments, the base editor system capable of multiplex editing comprising one of the ABE8 base editor variants described herein has at least 1.1 fold, at least 1.2 fold, at least 1.3 fold, at least 1.4 fold, at least 1.5 fold, at least 1.6 fold, at least 1.7 fold, at least 1.8 fold, at least 1.9 fold, at least 2.0 fold, at least 2.1 fold, at least 2.2 fold, at least 2.3 fold, at least 2.4 fold, at least 2.5 fold, at least 2.6 fold, at least 2.7 fold, at least 2.8 fold, at least 2.9 fold, at least 3.0 fold, at least 3.1 fold, at least 3.2 fold, at least 3.3 fold, at least 3.4 fold, at least 3.5 fold, at least 4.0 fold, at least 4.5 fold, at least 5.0 fold, at least 5.5 fold, or at least 6.0 fold higher multiplex editing efficiency compared the base editor system capable of multiplex editing comprising one of ABE7 base editors. In some embodiments, use of a base editor system capable of multiplex editing of a plurality of nucleobase pairs in one or more genes described herein does not comprise a risk or occurrence of chromosomal translocations.

### Expression of Fusion Proteins or Complexes in a Host Cell

[0989] Polypeptides of the present disclosure may be expressed in virtually any host cell of interest, including mammalian cells (e.g., human cells). In some embodiments, the host cell is an immune cell (e.g., T- or NK-cell). In some embodiments, the host cell is an allogeneic immune cell (e.g., T- or NK-cell). In some embodiments, the host cell is a CAR-T cell.

[0990] For example, a DNA encoding a polypeptide of the present disclosure can be cloned by designing suitable primers for the upstream and downstream of CDS based on the cDNA sequence The cloned DNA may be directly, or after digestion with a restriction enzyme when desired, or after addition of a suitable linker and/or a nuclear localization signal, ligated with a DNA encoding one or more additional components of a base editing system. The base editing system is translated in a host cell to form a complex.

[0991] A DNA encoding a protein domain described herein can be obtained by chemically synthesizing the DNA, or by connecting synthesized partly overlapping oligoDNA short chains by utilizing the PCR method and the Gibson Assembly method to construct a DNA encoding the full length thereof. The advantage of constructing a full-length DNA by chemical synthesis or a combination of PCR method or Gibson Assembly method is that the codon to be used can be designed in CDS full-length according to the host into which the DNA is introduced. In the expression of a heterologous DNA, the protein expression level is expected to increase by converting the DNA sequence thereof to a codon highly frequently used in the host organism. As the data of codon use frequency in host to be used, for example, the genetic code use frequency database (kazusa.or.jp/codon/index.html) disclosed in the home page of Kazusa DNA Research Institute can be used, or documents showing the codon use frequency in each host may be referred to. By reference to the obtained data and the DNA sequence to be introduced, codons showing low use frequency in the host from among those used for the DNA sequence may be converted to a codon coding the same amino acid and showing high use frequency.

[0992] An expression vector containing a DNA encoding a nucleic acid sequence-recognizing module and/or a nucleic acid base converting enzyme can be produced, for example, by linking the DNA to the downstream of a promoter in a suitable expression vector. As the expression vector, animal cell expression plasmids (e.g., pA1-11, pXT1, pRc/CMV, pRc/RSV, pcDNAI/Neo); and animal virus vectors such as retrovirus, vaccinia virus, lentivirus, adenovirus and the like are used.

[0993] In some embodiments, the disclosure provides methods for introducing a heterologous polynucleotide into a cell of interest. In embodiments, the methods do not involve the use of a viral particle and/or viral vector. For example, the disclosure provides a method of inserting a heterologous polynucleotide into the genome of a cell using a nuclease (e.g., Cas9 or Cas12 (e.g., Cas12b)) ribonucleoprotein complex (RNP)-DNA template complex where an RNP including a nuclease domain (e.g., Cas9 or Cas12) and a guide RNA, where the guide RNA specifically hybridizes to a target region of the genome of the cell, and where the nuclease domain cleaves the target region to create an insertion site in the genome of the cell. A DNA template is then used to introduce a heterologous polynucleotide. In embodiments, the DNA template is a double-stranded or single-stranded DNA template, wherein the size of the DNA template is about 200 nucleotides or is greater than about 200 nucleotides, wherein the 5′ and 3′ ends of the DNA template comprise nucleotide sequences that are homologous to genomic sequences flanking the insertion site. In embodiments, the DNA template is a single-stranded circular DNA template. In embodiments, the molar ratio of RNP to DNA template in the complex is from about 3:1 to about 100:1.

[0994] In some embodiments, the DNA template is a linear DNA template. In some embodiments, the DNA template is a circular DNA template (e.g., a single-stranded circular DNA template). In some examples, the DNA template is a single-stranded DNA template. In certain embodiments, the single-stranded DNA template is a pure single-stranded DNA template. In some embodiments, the single stranded DNA template is a single-stranded oligodeoxynucleotide (ssODN).

[0995] In some embodiments, the nucleic acid sequence is inserted into the genome of the cell (e.g., T cell) by introducing a vector, for example, a viral or non-viral vector, comprising the nucleic acid. Examples of viral vectors include, but are not limited to, adeno-associated viral (AAV) vectors, retroviral vectors or lentiviral vectors. In some embodiments, the lentiviral vector is an integrase-deficient lentiviral vector.

[0996] In some embodiments, the nucleic acid sequence is inserted into the genome of the cell (e.g., T cell) via non-viral delivery. In non-viral delivery methods, the nucleic acid can be naked DNA, or in a non-viral plasmid or vector.

[0997] In some embodiments, the nucleic acid is inserted into the cell by introducing into the cell, (a) a targeted nuclease (e.g., a Cas9 or Cas12) that cleaves a target region to create an insertion site in the genome of the T cell; and (b) the nucleic acid sequence, wherein the nucleic acid sequence is incorporated into the insertion site by HDR.

[0998] In some cases, the nucleic acid sequence is introduced into the cell as a linear DNA template. In some cases, the nucleic acid sequence is introduced into the cell as a double-stranded DNA template. In some cases, the DNA template is a single-stranded DNA template. In some cases, the single-stranded DNA template is a pure single-stranded DNA template. As used herein, by “pure single-stranded DNA” is meant single-stranded DNA that substantially lacks the other or opposite strand of DNA. By “substantially lacks” is meant that the pure single-stranded DNA lacks at least 100-fold more of one strand than another strand of DNA. In some cases, the DNA template is a double-stranded or single-stranded plasmid or mini-circle. Methods for integrating such templates are known in the art and described, for example, in US Patent Publication Nos. 20190388469, 20210388362, 20210207174, 20210353678, 20200362355, and 20210228631, which are incorporated herein by reference. See also, Roth, T. L et al., Reprogramming human T cell function and specificity with non-viral genome targeting. Nat. Lett. 559, 405-409 (2018); Ferenczi et al., Nat Commun 12, 6751 (2021). https://doi.org/10.1038/s41467-021-27004-1; Zhang et al., Homology-based repair induced by CRISPR-Cas nucleases in mammalian embryo genome editing. Protein Cell (2021). https://doi.org/10.1007/s13238-021-00838-7 Regarding the promoter to be used, any promoter appropriate for a host to be used for gene expression can be used. In a conventional method using double-stranded breaks, since the survival rate of the host cell sometimes decreases markedly due to the toxicity, it is desirable to increase the number of cells by the start of the induction by using an inductive promoter. However, since sufficient cell proliferation can also be afforded by expressing the nucleic acid-modifying enzyme complex of the present disclosure, a constitutive promoter can be used without limitation.

[0999] For example, when the host is an animal cell, an SRu promoter, SV40 promoter, LTR promoter, cytomegalovirus (CMV) promoter, Rous sarcoma virus (RSV) promoter, Moloney mouse leukemia virus (MoMuLV), LTR, herpes simplex virus thymidine kinase (HSV-TK) promoter, and the like can be used. Of these, CMV promoter, SR.alpha. promoter and the like are preferable.

[1000] Expression vectors for use in the present invention, besides those mentioned above, can comprise an enhancer, a splicing signal, a terminator, a polyA addition signal, a selection marker such as drug resistance gene, an auxotrophic complementary gene and the like, a replication origin, and the like can be used.

[1001] An RNA encoding a protein domain described herein can be prepared by, for example, in vitro transcription of a nucleic acid sequence encoding any of the polypeptides disclosed herein. A polypeptide of the present disclosure can be intracellularly expressed by introducing into the cell an expression vector comprising a nucleic acid sequence encoding the polypeptide.

[1002] Animal cells contemplated in the present disclosure include, but are not limited to, cell lines such as monkey COS-7 cells, monkey Vero cells, Chinese hamster ovary (CHO) cells, dhfr gene-deficient CHO cells, mouse L cells, mouse AtT-20 cells, mouse myeloma cells, rat GH3 cells, human FL cells and the like, pluripotent stem cells such as iPS cells, ES cells derived humans and other mammals, and primary cultured cells prepared from various tissues. Furthermore, zebrafish embryo, Xenopus oocyte, and the like can also be used. All the above-mentioned host cells may be haploid (monoploid), or polyploid (e.g., diploid, triploid, tetraploid, etc.). Using conventional methods, mutations, in principle, introduced into only one homologous chromosome produce a heterogenous cell. Therefore, the desired phenotype is not expressed unless the mutation is dominant. For recessive mutations, acquiring a homozygous cell can be inconvenient due to labor and time requirements. In contrast, according to the present disclosure, since a mutation can be introduced into any allele on the homologous chromosome in the genome, the desired phenotype can be expressed in a single generation even in the case of recessive mutation, thereby solving the problem associated with conventional mutagenesis methods.

[1003] An expression vector can be introduced by a known method (e.g., the lysozyme method, the competent method, the PEG method, the CaCl₂) coprecipitation method, electroporation, microinjection, particle gun method, lipofection, Agrobacterium-mediated delivery, etc.) according to the kind of the host.

[1004] A vector can be introduced into an animal cell according to the methods described in, for example, Cell Engineering additional volume 8, New Cell Engineering Experiment Protocol, 263-267 (1995) (published by Shujunsha), and Virology, 52, 456 (1973).

[1005] As a medium for culturing an animal cell, for example, minimum essential medium (MEM) containing about 5 to about 20% of fetal bovine serum [Science, 122, 501 (1952)], Dulbecco's modified Eagle medium (DMEM) [Virology, 8, 396 (1959)], RPMI 1640 medium [The Journal of the American Medical Association, 199, 519 (1967)], 199 medium [Proceeding of the Society for the Biological Medicine, 73, 1 (1950)] and the like are used. The pH of the medium is preferably about 6 to about 8. The culture is performed at generally about 30° C. to about 40° C. Where necessary, aeration and stirring may be performed.

[1006] When a higher eukaryotic cell, such as animal cell, is used as a host cell, a DNA encoding a base editing system of the present disclosure is introduced into a host cell under the regulation of an inducible promoter (e.g., metallothionein promoter (induced by heavy metal ion), heat shock protein promoter (induced by heat shock), Tet-ON/Tet-OFF system promoter (induced by addition or removal of tetracycline or a derivative thereof), steroid-responsive promoter (induced by steroid hormone or a derivative thereof) etc.), the induction substance is added to the medium (or removed from the medium) at an appropriate stage to induce expression of the nucleic acid-modifying enzyme complex, culture is performed for a given period to carry out a base editing and, introduction of a mutation into a target gene, transient expression of the base editing system can be realized.

[1007] Alternatively, the above-mentioned inductive promoter can also be utilized as a vector removal mechanism when higher eukaryotic cells, such as animal cells, and the like are used as a host cell. That is, a vector is mounted with a replication origin that functions in a host cell, and a nucleic acid encoding a protein necessary for replication (e.g., SV40 on and large T antigen, oriP and EBNA-1 etc. for animal cells), of the expression of the nucleic acid encoding the protein is regulated by the above-mentioned inducible promoter. As a result, while the vector is autonomously replicable in the presence of an induction substance, when the induction substance is removed, autonomous replication is not available, and the vector naturally falls off along with cell division (autonomous replication is not possible by the addition of tetracycline and doxycycline in Tet-OFF system vector).

### Delivery System

[1008] The suitability of nucleobase editors to target one or more nucleotides in a polynucleotide sequence (e.g., a gene) is evaluated as described herein. In one embodiment, a single cell of interest is transfected, transduced, or otherwise modified with a nucleic acid molecule or molecules encoding a base editing system described herein together with a small amount of a vector encoding a reporter (e.g., GFP). These cells can be any cell line known in the art, including immune cells (e.g., T- or NK-cells), or immortalized human cell lines, such as 293T, K562 or U20S. Alternatively, primary cells (e.g., human immune cells) may be used. Cells may also be obtained from a subject or individual, such as from tissue biopsy, surgery, blood, plasma, serum, or other biological fluid. Such cells may be relevant to the eventual cell target.

[1009] Delivery may be performed using a viral vector. In one embodiment, transfection may be performed using lipid transfection (such as Lipofectamine or Fugene) or by electroporation. Following transfection, expression of a reporter (e.g., GFP) can be determined either by fluorescence microscopy or by flow cytometry to confirm consistent and high levels of transfection. These preliminary transfections can comprise different nucleobase editors to determine which combinations of editors give the greatest activity. The system can comprise one or more different vectors. In one embodiment, the base editor is codon optimized for expression of the desired cell type, preferentially a eukaryotic cell, preferably a mammalian cell or a human cell.

[1010] The activity of the nucleobase editor is assessed as described herein, i.e., by sequencing the genome of the cells to detect alterations in a target sequence. For Sanger sequencing, purified PCR amplicons are cloned into a plasmid backbone, transformed, miniprepped and sequenced with a single primer. Sequencing may also be performed using next generation sequencing (NGS) techniques. When using next generation sequencing, amplicons may be 300-500 bp with the intended cut site placed asymmetrically. Following PCR, next generation sequencing adapters and barcodes (for example Illumina multiplex adapters and indexes) may be added to the ends of the amplicon, e.g., for use in high throughput sequencing (for example on an Illumina MiSeq). The fusion proteins or complexes that induce the greatest levels of target specific alterations in initial tests can be selected for further evaluation.

[1011] In particular embodiments, the nucleobase editors are used to target polynucleotides of interest. In one embodiment, a nucleobase editor of the present disclosure is delivered to cells (e.g., immune cells (e.g., T- or NK-cells)) in conjunction with one or more guide RNAs that are used to target one or more nucleic acid sequences of interest within the genome of a cell, thereby altering the target gene(s) (e.g., β2M, TAP1, TAP2, Tapasin, and/or CD58). In some embodiments, a base editor is targeted by one or more guide RNAs to introduce one or more edits to the sequence of one or more genes of interest (e.g., immune cells (e.g., T- or NK-cells)). In some embodiments, the one or more edits to the sequence of one or more genes of interest decrease or eliminate expression of the protein encoded by the gene in the host cell (e.g., immune cells (e.g., T- or NK-cells)). In some embodiments, expression of one or more proteins encoded by one or more genes of interest (e.g., β2M, TAP1, TAP2, Tapasin, and/or CD58) is completely knocked out or eliminated in the host cell (e.g., immune cells (e.g., T- or NK-cells)).

[1012] In some embodiments, the host cell is selected from a human cell, or mammalian cell in vitro or in vivo. In some embodiments, the host cell is an immune cell. In some embodiments, the immune cell is a T cell. In some embodiments, the immune cell is a NK cell. In some embodiments, one or more edits are introduced into one or more genes of the immune cell selected from β2M, TAP1, TAP2, Tapasin, and CD58.

### Nucleic Acid-Based Delivery of Base Editor Systems

[1013] Nucleic acid molecules encoding a base editor system according to the present disclosure can be administered to subjects or delivered into cells in vitro or in vivo by art-known methods or as described herein. For example, a base editor system comprising a deaminase (e.g., cytidine or adenine deaminase) can be delivered by vectors (e.g., viral or non-viral vectors), or by naked DNA, DNA complexes, lipid nanoparticles, or a combination of the aforementioned compositions.

[1014] Nucleic acids encoding cytidine or adenosine base editors can be delivered directly to cells (e.g., immune cells) as naked DNA or RNA, for instance by means of transfection or electroporation, or can be conjugated to molecules (e.g., N-acetylgalactosamine) promoting uptake by the target cells. Nucleic acid vectors, such as the vectors described herein can also be used. In particular embodiments, a polynucleotide, e.g. a mRNA encoding a base editor or a functional component thereof may be co-electroporated with a combination of multiple guide RNAs as described herein.

[1015] Nanoparticles, which can be organic or inorganic, are useful for delivering a base editor system or component thereof. Nanoparticles are well known in the art and any suitable nanoparticle can be used to deliver a base editor system or component thereof, or a nucleic acid molecule encoding such components. In one example, organic (e.g. lipid and/or polymer) nanoparticles are suitable for use as delivery vehicles in certain embodiments of this disclosure. Exemplary lipids for use in nanoparticle formulations, and/or gene transfer are shown in Table 16 (below).

TABLE 16
Lipids used for gene transfer.

| Lipid | Abbreviation | Feature |
|---|---|---|
| 1,2-Dioleoyl-sn-glycero-3-phosphatidylcholine | DOPC | Helper |
| 1,2-Dioleoyl-sn-glycero-3-phosphatidylethanolamine | DOPE | Helper |
| Cholesterol | | Helper |
| N-[1-(2,3-Dioleyloxy)prophyl]N,N,N-trimethylammonium | DOTMA | Cationic |
| chloride | | |
| 1,2-Dioleoyloxy-3-trimethylammonium-propane | DOTAP | Cationic |
| Dioctadecylamidoglycylspermine | DOGS | Cationic |
| N-(3-Aminopropyl)-N,N-dimethyl-2,3-bis(dodecyloxy)-1- | GAP-DLRIE | Cationic |
| propanaminium bromide | | |
| Cetyltrimethylammonium bromide | CTAB | Cationic |
| 6-Lauroxyhexyl ornithinate | LHON | Cationic |
| 1-(2,3-Dioleoyloxypropyl)-2,4,6-trimethylpyridinium | 2Oc | Cationic |
| 2,3-Dioleyloxy-N-[2(sperminecarboxamido-ethyl]-N,N- | DOSPA | Cationic |
| dimethyl-1-propanaminium trifluoroacetate | | |
| 1,2-Dioleyl-3-trimethylammonium-propane | DOPA | Cationic |
| N-(2-Hydroxyethyl)-N,N-dimethyl-2,3-bis(tetradecyloxy)-1- | MDRIE | Cationic |
| propanaminium bromide | | |
| Dimyristooxypropyl dimethyl hydroxyethyl ammonium bromide | DMRI | Cationic |
| 3β-[N-(N′,N′-Dimethylaminoethane)-carbamoyl]cholesterol | DC-Chol | Cationic |
| Bis-guanidium-tren-cholesterol | BGTC | Cationic |
| 1,3-Diodeoxy-2-(6-carboxy-spermyl)-propylamide | DOSPER | Cationic |
| Dimethyloctadecylammonium bromide | DDAB | Cationic |
| Dioctadecylamidoglicylspermidin | DSL | Cationic |
| rac-[(2,3-Dioctadecyloxypropyl)(2-hydroxyethyl)]- | CLIP-1 | Cationic |
| dimethylammonium chloride | | |
| rac-[2(2,3-Dihexadecyloxypropyl- | CLIP-6 | Cationic |
| oxymethyloxy)ethyl]trimethylammoniun bromide | | |
| Ethyldimyristoylphosphatidylcholine | EDMPC | Cationic |
| 1,2-Distearyloxy-N,N-dimethyl-3-aminopropane | DSDMA | Cationic |
| 1,2-Dimyristoyl-trimethylammonium propane | DMTAP | Cationic |
| O,O′-Dimyristyl-N-lysyl aspartate | DMKE | Cationic |
| 1,2-Distearoyl-sn-glycero-3-ethylphosphocholine | DSEPC | Cationic |
| N-Palmitoyl D-erythro-sphingosyl carbamoyl-spermine | CCS | Cationic |
| N-t-Butyl-N0-tetradecyl-3-tetradecylaminopropionamidine | diC14-amidine | Cationic |
| Octadecenolyoxy[ethyl-2-heptadecenyl-3 hydroxyethyl] | DOTIM | Cationic |
| imidazolinium chloride | | |
| N1-Cholesteryloxycarbonyl-3,7-diazanonane-1,9-diamine | CDAN | Cationic |
| 2-(3-[Bis(3-amino-propyl)-amino]propylamino)-N- | RPR209120 | Cationic |
| ditetradecylcarbamoylme-ethyl-acetamide | | |
| 1,2-dilinoleyloxy-3-dimethylaminopropane | DLinDMA | Cationic |
| 2,2-dilinoleyl-4-dimethylaminoethyl-[1,3]-dioxolane | DLin-KC2- | Cationic |
| | DMA | |
| dilinoleyl-methyl-4-dimethylaminobutyrate | DLin-MC3- | Cationic |
| | DMA | |

[1016] Table 17 lists exemplary polymers for use in gene transfer and/or nanoparticle formulations.

TABLE 17
Polymers used for gene transfer.

| Polymer | Abbreviation |
|---|---|
| Poly(ethylene)glycol | PEG |
| Polyethylenimine | PEI |
| Dithiobis (succinimidylpropionate) | DSP |
| Dimethyl-3,3′-dithiobispropionimidate | DTBP |
| Poly(ethylene imine)biscarbamate | PEIC |
| Poly(L-lysine) | PLL |
| Histidine modified PLL | |
| Poly(N-vinylpyrrolidone) | PVP |
| Poly (propylenimine) | PPI |
| Poly(amidoamine) | PAMAM |
| Poly(amidoethylenimine) | SS-PAEI |
| Triethylenetetramine | TETA |
| Poly(β-aminoester) | |
| Poly(4-hydroxy-L-proline ester) | PHP |
| Poly(allylamine) | |
| Poly(α-[4-aminobutyl]-L-glycolic acid) | PAGA |
| Poly(D, L-lactic-co-glycolic acid) | PLGA |
| Poly(N-ethyl-4-vinylpyridinium bromide) | |
| Poly (phosphazene)s | PPZ |
| Poly(phosphoester)s | PPE |
| Poly(phosphoramidate)s | PPA |
| Poly(N-2-hydroxypropylmethacrylamide) | pHPMA |
| Poly (2-(dimethylamino)ethyl methacrylate) | pDMAEMA |
| Poly(2-aminoethyl propylene phosphate) | PPE−EA |
| Chitosan | |
| Galactosylated chitosan | |
| N-Dodacylated chitosan | |
| Histone | |
| Collagen | |
| Dextran-spermine | D-SPM |

[1017] Table 18 summarizes delivery methods for a polynucleotide encoding a fusion protein or complex described herein.

TABLE 18
Delivery methods.

| | | Delivery into | | | Type of |
|---|---|---|---|---|---|
| | | Non-Dividing | Duration of | Genome | Molecule |
| Delivery | Vector/Mode | Cells | Expression | Integration | Delivered |
| Physical | (e.g., | YES | Transient | NO | Nucleic Acids |
| | electroporation, | | | | and Proteins |
| | particle gun, | | | | |
| | Calcium | | | | |
| | Phosphate | | | | |
| | transfection | | | | |
| Viral | Retrovirus | NO | Stable | YES | RNA |
| | Lentivirus | YES | Stable | YES/NO with | RNA |
| | | | | modification | |
| | Adenovirus | YES | Transient | NO | DNA |
| | Adeno- | YES | Stable | NO | DNA |
| | Associated | | | | |
| | Virus (AAV) | | | | |
| | Vaccinia Virus | YES | Very | NO | DNA |
| | | | Transient | | |
| | Herpes Simplex | YES | Stable | NO | DNA |
| | Virus | | | | |
| Non-Viral | Cationic | YES | Transient | Depends on | Nucleic Acids |
| | Liposomes | | | what is | and Proteins |
| | | | | delivered | |
| | Polymeric | YES | Transient | Depends on | Nucleic Acids |
| | Nanoparticles | | | what is | and Proteins |
| | | | | delivered | |
| Biological | Attenuated | YES | Transient | NO | Nucleic Acids |
| Non-Viral | Bacteria | | | | |
| Delivery | Engineered | YES | Transient | NO | Nucleic Acids |
| Vehicles | Bacteriophages | | | | |
| | Mammalian | YES | Transient | NO | Nucleic Acids |
| | Virus-like | | | | |
| | Particles | | | | |
| | Biological | YES | Transient | NO | Nucleic Acids |
| | liposomes: | | | | |
| | Erythrocyte | | | | |
| | Ghosts and | | | | |
| | Exosomes | | | | |

[1018] In another aspect, the delivery of base editor system components or nucleic acids encoding such components, for example, a polynucleotide programmable nucleotide binding domain (e.g., Cas9) such as, for example, Cas9 or variants thereof, and a gRNA targeting a nucleic acid sequence of interest, may be accomplished by delivering the ribonucleoprotein (RNP) to cells. The RNP comprises a polynucleotide programmable nucleotide binding domain (e.g., Cas9), in complex with the targeting gRNA. RNPs or polynucleotides described herein may be delivered to cells using known methods, such as electroporation, nucleofection, or cationic lipid-mediated methods, for example, as reported by Zuris, J. A. et al., 2015, Nat. Biotechnology, 33(1):73-80, which is incorporated by reference in its entirety. RNPs are advantageous for use in CRISPR base editing systems, particularly for cells that are difficult to transfect, such as primary cells. In addition, RNPs can also alleviate difficulties that may occur with protein expression in cells, especially when eukaryotic promoters, e.g., CMV or EF1A, which may be used in CRISPR plasmids, are not well-expressed. Advantageously, the use of RNPs does not require the delivery of foreign DNA into cells. Moreover, because an RNP comprising a nucleic acid binding protein and gRNA complex is degraded over time, the use of RNPs has the potential to limit off-target effects. In a manner similar to that for plasmid based techniques, RNPs can be used to deliver binding protein (e.g., Cas9 variants) and to direct homology directed repair (HDR).

[1019] Nucleic acid molecules encoding a base editor system can be delivered directly to cells (e.g., T- or NK-cells)) as naked DNA or RNA by means of transfection or electroporation, for example, or can be conjugated to molecules (e.g., N-acetylgalactosamine) promoting uptake by the target cells. Vectors encoding base editor systems and/or their components can also be used. In particular embodiments, a polynucleotide, e.g. a mRNA encoding a base editor system or a functional component thereof, may be co-electroporated with one or more guide RNAs as described herein.

[1020] Nucleic acid vectors can comprise one or more sequences encoding a domain of a fusion protein or complex described herein. A vector can also encode a protein component of a base editor system operably linked to a nuclear localization signal, nucleolar localization signal, or mitochondrial localization signal. As one example, a vector can include a Cas9 coding sequence that includes one or more nuclear localization sequences (e.g., a nuclear localization sequence from SV40), and one or more deaminases.

[1021] The vector can also include any suitable number of regulatory/control elements, e.g., promoters, enhancers, introns, polyadenylation signals, Kozak consensus sequences, or internal ribosome entry sites (IRES). These elements are well known in the art.

[1022] Vectors according to this disclosure include recombinant viral vectors. Exemplary viral vectors are set forth herein above. Other viral vectors known in the art can also be used. In addition, viral particles can be used to deliver base editor system components in nucleic acid and/or protein form. For example, “empty” viral particles can be assembled to contain a base editor system or component as cargo. Viral vectors and viral particles can also be engineered to incorporate targeting ligands to alter target tissue specificity.

[1023] Vectors described herein may comprise regulatory elements to drive expression of a base editor system or component thereof. Such vectors include adeno-associated viruses with inverted long terminal repeats (AAV ITR). The use of AAV-ITR can be advantageous for eliminating the need for an additional promoter element, which can take up space in the vector. The additional space freed up can be used to drive the expression of additional elements, such as a guide nucleic acid or a selectable marker. ITR activity can be used to reduce potential toxicity due to over expression.

[1024] Any suitable promoter can be used to drive expression of a base editor system or component thereof and, where appropriate, the guide nucleic acid. For ubiquitous expression, promoters include CMV, CBA, CBH, CAG, CBh, PGK, SV40, Ferritin heavy or light chains. For brain or other CNS cell expression, suitable promoters include: SynapsinI for all neurons, CaMKIIalpha for excitatory neurons, GAD67 or GAD65 or VGAT for GABAergic neurons. For liver cell expression, suitable promoters include the Albumin promoter. For lung cell expression, suitable promoters include SP-B. For endothelial cells, suitable promoters include ICAM. For hematopoietic cell expression suitable promoters include IFNbeta or CD45. For osteoblast expression suitable promoters can include OG-2.

[1025] In some embodiments, a base editor system of the present disclosure is of small enough size to allow separate promoters to drive expression of the base editor and a compatible guide nucleic acid within the same nucleic acid molecule. For instance, a vector or viral vector can comprise a first promoter operably linked to a nucleic acid encoding the base editor and a second promoter operably linked to the guide nucleic acid.

[1026] The promoter used to drive expression of a guide nucleic acid can include: Pol III promoters, such as U6 or H1 Use of Pol II promoter and intronic cassettes to express gRNA Adeno Associated Virus (AAV).

[1027] In particular embodiments, a fusion protein or complex of the present disclosure is encoded by a polynucleotide present in a viral vector (e.g., adeno-associated virus (AAV), AAV3, AAV3b, AAV4, AAV5, AAV6, AAV7, AAV8, AAV9, AAVrh8, AAV10, and variants thereof), or a suitable capsid protein of any viral vector. Thus, in some aspects, the disclosure relates to the viral delivery of a fusion protein or complex. Examples of viral vectors include retroviral vectors (e.g. Maloney murine leukemia virus, MML-V), adenoviral vectors (e.g. AD100), lentiviral vectors (HIV and FIV-based vectors), herpesvirus vectors (e.g. HSV-2).

[1028] In some aspects, the methods described herein for editing specific genes in a cell can be used to genetically modify an immune cell (e.g., T- or NK-cell). In some aspects, the methods described herein for editing specific genes in an immune cell can be used to genetically modify a CAR-T cell. Such CAR-T cells, and methods to produce such CAR-T cells are described in International Application Nos. PCT/US2016/060736, PCT/US2016/060734, PCT/US2016/034873, PCT/US2015/040660, PCT/EP2016/055332, PCT/IB2015/058650, PCT/EP2015/067441, PCT/EP2014/078876, PCT/EP2014/059662, PCT/IB2014/061409, PCT/US2016/019192, PCT/US2015/059106, PCT/US2016/052260, PCT/US2015/020606, PCT/US2015/055764, PCT/CN2014/094393, PCT/US2017/059989, PCT/US2017/027606, and PCT/US2015/064269, the contents of each is hereby incorporated in its entirety.

### Viral Vectors

[1029] Base editors and constructs (e.g., soluble or membrane-bound HLA-G and/or HLA-E trimers and/or dimers) described herein can be delivered with a viral vector. In some embodiments, a base editor, and/or construct disclosed herein can be encoded on a nucleic acid that is contained in a viral vector. In some embodiments, one or more components of the base editor system and/or construct can be encoded on one or more viral vectors. For example, a base editor and guide nucleic acid, and/or construct can be encoded on a single viral vector. In other embodiments, the base editor and guide nucleic acid, and/or construct are encoded on different viral vectors. In either case, the base editor and guide nucleic acid, and/or construct can each be operably linked to a promoter and terminator. The combination of components encoded on a viral vector can be determined by the cargo size constraints of the chosen viral vector.

[1030] The use of RNA or DNA viral based systems for the delivery of a base editor or construct takes advantage of highly evolved processes for targeting a virus to specific cells in culture or in the host and trafficking the viral payload to the nucleus or host cell genome. Viral vectors can be administered directly to cells in culture, patients (in vivo), or they can be used to treat cells in vitro, and the modified cells can optionally be administered to patients (ex vivo). Conventional viral based systems could include retroviral, lentivirus, adenoviral, adeno-associated and herpes simplex virus vectors for gene transfer. Integration in the host genome is possible with the retrovirus, lentivirus, and adeno-associated virus gene transfer methods, often resulting in long term expression of the inserted transgene. Additionally, high transduction efficiencies have been observed in many different cell types and target tissues.

[1031] Viral vectors can include lentivirus (e.g., HIV and FIV-based vectors), Adenovirus (e.g., AD100), Retrovirus (e.g., Maloney murine leukemia virus, MML-V), herpesvirus vectors (e.g., HSV-2), and Adeno-associated viruses (AAVs), or other plasmid or viral vector types, in particular, using formulations and doses from, for example, U.S. Pat. No. 8,454,972 (formulations, doses for adenovirus), U.S. Pat. No. 8,404,658 (formulations, doses for AAV) and U.S. Pat. No. 5,846,946 (formulations, doses for DNA plasmids) and from clinical trials and publications regarding the clinical trials involving lentivirus, AAV and adenovirus. For example, for AAV, the route of administration, formulation and dose can be as in U.S. Pat. No. 8,454,972 and as in clinical trials involving AAV. For Adenovirus, the route of administration, formulation and dose can be as in U.S. Pat. No. 8,404,658 and as in clinical trials involving adenovirus. For plasmid delivery, the route of administration, formulation and dose can be as in U.S. Pat. No. 5,846,946 and as in clinical studies involving plasmids. Doses can be based on or extrapolated to an average 70 kg individual (e.g. a male adult human), and can be adjusted for patients, subjects, mammals of different weight and species. Frequency of administration is within the ambit of the medical or veterinary practitioner (e.g., physician, veterinarian), depending on usual factors including the age, sex, general health, other conditions of the patient or subject and the particular condition or symptoms being addressed. The viral vectors can be injected into the tissue of interest. For cell-type specific base editing or expression of a construct, the expression of the base editor and optional guide nucleic acid, and/or construct can be driven by a cell-type specific promoter. Non-limiting examples of suitable promoters include promoter elongation factor-1 alpha.

[1032] The tropism of a retrovirus can be altered by incorporating foreign envelope proteins, expanding the potential target population of target cells. Lentiviral vectors are retroviral vectors that are able to transduce or infect non-dividing cells and typically produce high viral titers. Selection of a retroviral gene transfer system would therefore depend on the target tissue. Retroviral vectors are comprised of cis-acting long terminal repeats with packaging capacity for up to 6-10 kb of foreign sequence. The minimum cis-acting LTRs are sufficient for replication and packaging of the vectors, which are then used to integrate the therapeutic gene into the target cell to provide permanent transgene expression. Widely used retroviral vectors include those based upon murine leukemia virus (MuLV), gibbon ape leukemia virus (GaLV), Simian Immuno deficiency virus (SIV), human immuno deficiency virus (HIV), and combinations thereof (See, e.g., Buchscher et al., J. Virol. 66:2731-2739 (1992); Johann et al., J. Virol. 66:1635-1640 (1992); Sommnerfelt et al., Virol. 176:58-59 (1990); Wilson et al., J. Virol. 63:2374-2378 (1989); Miller et al., J. Virol. 65:2220-2224 (1991); PCT/US94/05700).

[1033] Retroviral vectors, especially lentiviral vectors, can require polynucleotide sequences smaller than a given length for efficient integration into a target cell. For example, retroviral vectors of length greater than 9 kb can result in low viral titers compared with those of smaller size. In some aspects, a base editor or construct of the present disclosure is of sufficient size so as to enable efficient packaging and delivery into a target cell via a retroviral vector. In some embodiments, a base editor or construct is of a size so as to allow efficient packing and delivery even when expressed together with a guide nucleic acid and/or other components of a targetable nuclease system.

[1034] Packaging cells are typically used to form virus particles that are capable of infecting a host cell. Such cells include 293 cells, which package adenovirus, and psi.2 cells or PA317 cells, which package retrovirus. Viral vectors used in gene therapy are usually generated by producing a cell line that packages a nucleic acid vector into a viral particle. The vectors typically contain the minimal viral sequences required for packaging and subsequent integration into a host, other viral sequences being replaced by an expression cassette for the polynucleotide(s) to be expressed. The missing viral functions are typically supplied in trans by the packaging cell line. For example, Adeno-associated virus (“AAV”) vectors used in gene therapy typically only possess ITR sequences from the AAV genome which are required for packaging and integration into the host genome. Viral DNA can be packaged in a cell line, which contains a helper plasmid encoding the other AAV genes, namely rep and cap, but lacking ITR sequences. The cell line can also be infected with adenovirus as a helper. The helper virus can promote replication of the AAV vector and expression of AAV genes from the helper plasmid. The helper plasmid in some cases is not packaged in significant amounts due to a lack of ITR sequences. Contamination with adenovirus can be reduced by, e.g., heat treatment to which adenovirus is more sensitive than AAV.

[1035] In applications where transient expression is preferred, adenoviral based systems can be used. Adenoviral based vectors are capable of very high transduction efficiency in many cell types and do not require cell division. With such vectors, high titer and levels of expression have been obtained. This vector can be produced in large quantities in a relatively simple system. AAV vectors can also be used to transduce cells with target nucleic acids, e.g., in the in vitro production of nucleic acids and peptides, and for in vivo and ex vivo gene therapy procedures (See, e.g., West et al., Virology 160:38-47 (1987); U.S. Pat. No. 4,797,368; WO 93/24641; Kotin, Human Gene Therapy 5:793-801 (1994); Muzyczka, J. Clin. Invest. 94:1351 (1994). The construction of recombinant AAV vectors is described in a number of publications, including U.S. Pat. No. 5,173,414; Tratschin et al., Mol. Cell. Biol. 5:3251-3260 (1985); Tratschin, et al., Mol. Cell. Biol. 4:2072-2081 (1984); Hermonat & Muzyczka, PNAS 81:6466-6470 (1984); and Samulski et al., J. Virol. 63:03822-3828 (1989).

[1036] In some embodiments, AAV vectors are used to transduce a cell of interest with a polynucleotide encoding a base editor or base editor system as provided herein. AAV is a small, single-stranded DNA dependent virus belonging to the parvovirus family. The 4.7 kb wild-type (wt) AAV genome is made up of two genes that encode four replication proteins and three capsid proteins, respectively, and is flanked on either side by 145-bp inverted terminal repeats (ITRs). The virion is composed of three capsid proteins, Vp1, Vp2, and Vp3, produced in a 1:1:10 ratio from the same open reading frame but from differential splicing (Vp1) and alternative translational start sites (Vp2 and Vp3, respectively). Vp3 is the most abundant subunit in the virion and participates in receptor recognition at the cell surface defining the tropism of the virus. A phospholipase domain, which functions in viral infectivity, has been identified in the unique N terminus of Vp1.

[1037] Similar to wt AAV, recombinant AAV (rAAV) utilizes the cis-acting 145-bp ITRs to flank vector transgene cassettes, providing up to 4.5 kb for packaging of foreign DNA. Subsequent to infection, rAAV can express a fusion protein or complex of the present disclosure and persist without integration into the host genome by existing episomally in circular head-to-tail concatemers. Although there are numerous examples of rAAV success using this system, in vitro and in vivo, the limited packaging capacity has limited the use of AAV-mediated gene delivery when the length of the coding sequence of the gene is equal or greater in size than the wt AAV genome.

[1038] Viral vectors can be selected based on the application. For example, for in vivo gene delivery, AAV can be advantageous over other viral vectors. In some embodiments, AAV allows low toxicity, which can be due to the purification method not requiring ultra-centrifugation of cell particles that can activate the immune response. In some embodiments, AAV allows low probability of causing insertional mutagenesis because it doesn't integrate into the host genome. Adenoviruses are commonly used as vaccines because of the strong immunogenic response they induce. Packaging capacity of the viral vectors can limit the size of the base editor that can be packaged into the vector.

[1039] AAV has a packaging capacity of about 4.5 Kb or 4.75 Kb including two 145 base inverted terminal repeats (ITRs). This means disclosed base editor as well as a promoter and transcription terminator can fit into a single viral vector. Constructs larger than 4.5 or 4.75 Kb can lead to significantly reduced virus production. For example, SpCas9 is quite large, the gene itself is over 4.1 Kb, which makes it difficult for packing into AAV. Therefore, embodiments of the present disclosure include utilizing a disclosed base editor or construct which is shorter in length than conventional base editors. In some examples, the base editors or constructs are less than 4 kb. Disclosed base editors can be less than 4.5 kb, 4.4 kb, 4.3 kb, 4.2 kb, 4.1 kb, 4 kb, 3.9 kb, 3.8 kb, 3.7 kb, 3.6 kb, 3.5 kb, 3.4 kb, 3.3 kb, 3.2 kb, 3.1 kb, 3 kb, 2.9 kb, 2.8 kb, 2.7 kb, 2.6 kb, 2.5 kb, 2 kb, or 1.5 kb. In some embodiments, the disclosed base editors are 4.5 kb or less in length.

[1040] An AAV can be AAV1, AAV2, AAV5, AAV6 or any combination thereof. One can select the type of AAV with regard to the cells to be targeted; e.g., one can select AAV serotypes 1, 2, 5 or a hybrid capsid AAV1, AAV2, AAV5 or any combination thereof for targeting brain or neuronal cells; and one can select AAV4 for targeting cardiac tissue. AAV8 is useful for delivery to the liver. A tabulation of certain AAV serotypes as to these cells can be found in Grimm, D. et al, J. Virol. 82: 5887-5911 (2008)).

[1041] In some embodiments, lentiviral vectors are used to transduce an immune cell (e.g., T- or NK-cell) with a polynucleotide encoding a base editor or base editor system, and/or construct as provided herein. In some embodiments, lentiviral vectors are used to transduce an modified immune cell (e.g., T- or NK-cell) with a chimeric antigen receptor (CAR). Lentiviruses are complex retroviruses that have the ability to infect and express their genes in both mitotic and post-mitotic cells. The most commonly known lentivirus is the human immunodeficiency virus (HIV), which uses the envelope glycoproteins of other viruses to target a broad range of cell types.

[1042] Lentiviruses can be prepared as follows. After cloning pCasES10 (which contains a lentiviral transfer plasmid backbone), HEK293FT at low passage (p=5) were seeded in a T-75 flask to 50% confluence the day before transfection in DMEM with 10% fetal bovine serum and without antibiotics. After 20 hours, media is changed to OptiMEM (serum-free) media and transfection was done 4 hours later. Cells are transfected with 10 μg of lentiviral transfer plasmid (pCasES10) and the following packaging plasmids: 5 μg of pMD2.G (VSV-g pseudotype), and 7.5 μg of psPAX2 (gag/pol/rev/tat). Transfection can be done in 4 mL OptiMEM with a cationic lipid delivery agent (50 μl Lipofectamine 2000 and 100 μl Plus reagent). After 6 hours, the media is changed to antibiotic-free DMEM with 10% fetal bovine serum. These methods use serum during cell culture, but serum-free methods are preferred.

[1043] Lentivirus can be purified as follows. Viral supernatants are harvested after 48 hours. Supernatants are first cleared of debris and filtered through a 0.45 μm low protein binding (PVDF) filter. They are then spun in an ultracentrifuge for 2 hours at 24,000 rpm. Viral pellets are resuspended in 50 μl of DMEM overnight at 4° C. They are then aliquoted and immediately frozen at −80° C.

[1044] In another embodiment, minimal non-primate lentiviral vectors based on the equine infectious anemia virus (EIAV) are also contemplated. In another embodiment, RetinoStat®, an equine infectious anemia virus-based lentiviral gene therapy vector that expresses angiostatic proteins endostatin and angiostatin that is contemplated to be delivered via a subretinal injection. In another embodiment, use of self-inactivating lentiviral vectors are contemplated.

[1045] Any RNA of the systems, for example a guide RNA or a base editor-encoding mRNA, can be delivered in the form of RNA. Base editor-encoding mRNA can be generated using in vitro transcription. For example, nuclease mRNA can be synthesized using a PCR cassette containing the following elements: T7 promoter, optional kozak sequence (GCCACC), nuclease sequence, and 3′ UTR such as a 3′ UTR from beta globin-polyA tail. The cassette can be used for transcription by T7 polymerase. Guide polynucleotides (e.g., gRNA) can also be transcribed using in vitro transcription from a cassette containing a T7 promoter, followed by the sequence “GG”, and guide polynucleotide sequence.

[1046] To enhance expression and reduce possible toxicity, the base editor-coding sequence and/or the guide nucleic acid can be modified to include one or more modified nucleoside e.g. using pseudo-U or 5-Methyl-C.

[1047] The small packaging capacity of AAV vectors makes the delivery of a number of genes that exceed this size and/or the use of large physiological regulatory elements challenging. These challenges can be addressed, for example, by dividing the protein(s) to be delivered into two or more fragments, wherein the N-terminal fragment is fused to a split intein-N and the C-terminal fragment is fused to a split intein-C. These fragments are then packaged into two or more AAV vectors. As used herein, “intein” refers to a self-splicing protein intron (e.g., peptide) that ligates flanking N-terminal and C-terminal exteins (e.g., fragments to be joined). The use of certain inteins for joining heterologous protein fragments is described, for example, in Wood et al., J. Biol. Chem. 289(21); 14512-9 (2014). For example, when fused to separate protein fragments, the inteins IntN and IntC recognize each other, splice themselves out and simultaneously ligate the flanking N- and C-terminal exteins of the protein fragments to which they were fused, thereby reconstituting a full-length protein from the two protein fragments. Other suitable inteins will be apparent to a person of skill in the art.

[1048] A fragment (e.g., a functional fragment) of a fusion protein or complex of the present disclosure can vary in length. In some embodiments, a protein fragment ranges from 2 amino acids to about 1000 amino acids in length. In some embodiments, a protein fragment ranges from about 5 amino acids to about 500 amino acids in length. In some embodiments, a protein fragment ranges from about 20 amino acids to about 200 amino acids in length. In some embodiments, a protein fragment ranges from about 10 amino acids to about 100 amino acids in length. Suitable protein fragments of other lengths will be apparent to a person of skill in the art.

[1049] In one embodiment, dual AAV vectors are generated by splitting a large transgene expression cassette in two separate halves (5′ and 3′ ends, or head and tail), where each half of the cassette is packaged in a single AAV vector (of <5 kb). The re-assembly of the full-length transgene expression cassette is then achieved upon co-infection of the same cell by both dual AAV vectors followed by: (1) homologous recombination (HR) between 5′ and 3′ genomes (dual AAV overlapping vectors); (2) ITR-mediated tail-to-head concatemerization of 5′ and 3′ genomes (dual AAV trans-splicing vectors); or (3) a combination of these two mechanisms (dual AAV hybrid vectors). The use of dual AAV vectors in vivo results in the expression of full-length proteins. The use of the dual AAV vector platform represents an efficient and viable gene transfer strategy for transgenes of >4.7 kb in size.

### Non-Viral Platforms for Gene Transfer

[1050] Non-viral platforms for introducing a heterologous polynucleotide into a cell of interest are known in the art.

[1051] For example, the disclosure provides a method of inserting a heterologous polynucleotide into the genome of a cell using a Cas9 or Cas12 (e.g., Cas12b) ribonucleoprotein complex (RNP)-DNA template complex where an RNP including a Cas9 or Cas12 nuclease domain and a guide RNA, wherein the guide RNA specifically hybridizes to a target region of the genome of the cell, and wherein the Cas9 nuclease domain cleaves the target region to create an insertion site in the genome of the cell. A DNA template is then used to introduce a heterologous polynucleotide. In embodiments, the DNA template is a double-stranded or single-stranded DNA template, wherein the size of the DNA template is about 200 nucleotides or is greater than about 200 nucleotides, wherein the 5′ and 3′ ends of the DNA template comprise nucleotide sequences that are homologous to genomic sequences flanking the insertion site. In some embodiments, the DNA template is a single-stranded circular DNA template. In embodiments, the molar ratio of RNP to DNA template in the complex is from about 3:1 to about 100:1.

[1052] In some embodiments, the DNA template is a linear DNA template. In some examples, the DNA template is a single-stranded DNA template. In certain embodiments, the single-stranded DNA template is a pure single-stranded DNA template. In some embodiments, the single stranded DNA template is a single-stranded oligodeoxynucleotide (ssODN).

[1053] In some embodiments, the nucleic acid sequence is inserted into the genome of the cell (e.g., T cell) via non-viral delivery. In non-viral delivery methods, the nucleic acid can be naked DNA, or in a non-viral plasmid or vector.

[1054] In some embodiments, the nucleic acid is inserted into the cell by introducing into the cell, (a) a targeted nuclease that cleaves a target region to create an insertion site in the genome of the T cell; and (b) the nucleic acid sequence, wherein the nucleic acid sequence is incorporated into the insertion site by HDR.

[1055] In some cases, the nucleic acid sequence is introduced into the cell as a linear DNA template. In some cases, the nucleic acid sequence is introduced into the cell as a double-stranded DNA template. In some cases, the DNA template is a single-stranded DNA template. In some cases, the single-stranded DNA template is a pure single-stranded DNA template. As used herein, by “pure single-stranded DNA” is meant single-stranded DNA that substantially lacks the other or opposite strand of DNA. By “substantially lacks” is meant that the pure single-stranded DNA lacks at least 100-fold more of one strand than another strand of DNA. In some cases, the DNA template is a double-stranded or single-stranded plasmid or mini-circle.

[1056] In other embodiments, a single-stranded DNA (ssDNA) can produce efficient HDR with minimal off-target integration. In one embodiment, an ssDNA phage is used to efficiently and inexpensively produce long circular ssDNA (cssDNA) donors. These cssDNA donors serve as efficient HDR templates when used with Cas9 or Cas12 (e.g., Cas12a, Cas12b), with integration frequencies superior to linear ssDNA (QssDNA) donors.

[1057] Methods for integrating such templates are known in the art and described, for example, in US Patent Publications No. 20190388469, 20210388362, 20210207174, 20210353678, 20200362355, and 20210228631, which are incorporated herein by reference. See also, Roth, T. L et al., Reprogramming human T cell function and specificity with non-viral genome targeting. Nat. Lett. 559, 405-409 (2018); Ferenczi et al., Nat Commun 12, 6751 (2021). https://doi.org/10.1038/s41467-021-27004-1; Zhang et al., Homology-based repair induced by CRISPR-Cas nucleases in mammalian embryo genome editing. Protein Cell (2021). https://doi.org/10.1007/s13238-021-00838-7.

### Inteins

[1058] Inteins (intervening protein) are auto-processing domains found in a variety of diverse organisms, which carry out a process known as protein splicing. Protein splicing is a multi-step biochemical reaction comprised of both the cleavage and formation of peptide bonds. While the endogenous substrates of protein splicing are proteins found in intein-containing organisms, inteins can also be used to chemically manipulate virtually any polypeptide backbone.

[1059] In protein splicing, the intein excises itself out of a precursor polypeptide by cleaving two peptide bonds, thereby ligating the flanking extein (external protein) sequences via the formation of a new peptide bond. This rearrangement occurs post-translationally (or possibly co-translationally). Intein-mediated protein splicing occurs spontaneously, requiring only the folding of the intein domain.

[1060] About 5% of inteins are split inteins, which are transcribed and translated as two separate polypeptides, the N-intein and C-intein, each fused to one extein. Upon translation, the intein fragments spontaneously and non-covalently assemble into the canonical intein structure to carry out protein splicing in trans. The mechanism of protein splicing entails a series of acyl-transfer reactions that result in the cleavage of two peptide bonds at the intein-extein junctions and the formation of anew peptide bond between the N- and C-exteins. This process is initiated by activation of the peptide bond joining the N-extein and the N-terminus of the intein. Virtually all inteins have a cysteine or serine at their N-terminus that attacks the carbonyl carbon of the C-terminal N-extein residue. This N to O/S acyl-shift is facilitated by a conserved threonine and histidine (referred to as the TXXH motif), along with a commonly found aspartate, which results in the formation of a linear (thio)ester intermediate. Next, this intermediate is subject to trans-(thio)esterification by nucleophilic attack of the first C-extein residue (+1), which is a cysteine, serine, or threonine. The resulting branched (thio)ester intermediate is resolved through a unique transformation: cyclization of the highly conserved C-terminal asparagine of the intein. This process is facilitated by the histidine (found in a highly conserved HNF motif) and the penultimate histidine and may also involve the aspartate. This succinimide formation reaction excises the intein from the reactive complex and leaves behind the exteins attached through a non-peptidic linkage. This structure rapidly rearranges into a stable peptide bond in an intein-independent fashion. In some embodiments, the split intein is selected from Gp41.1, IMPDH.1, NrdJ.1 and Gp41.8 (Carvajal-Vallejos, Patricia et al. “Unprecedented rates and efficiencies revealed for new natural split inteins from metagenomic sources.” J. Biol. Chem., vol. 287,34 (2012)).

[1061] Non-limiting examples of inteins include any intein or intein-pair known in the art, which include a synthetic intein based on the dnaE intein, the Cfa-N (e.g., split intein-N) and Cfa-C (e.g., split intein-C) intein pair, has been described (e.g., in Stevens et al., J Am Chem Soc. 2016 Feb. 24; 138(7):2162-5, incorporated herein by reference), and DnaE. Non-limitine examples of pairs of inteins that may be used in accordance with the present disclosure include: Cfa DnaE intein, Ssp GyrB intein, Ssp DnaX intein, Ter DnaE3 intein, Ter ThyX intein, Rma DnaB intein and Cne Prp8 intein (e.g., as described in U.S. Pat. No. 8,394,604, incorporated herein by reference). Exemplary nucleotide and amino acid sequences of inteins are provided in the Sequence Listing at SEQ ID NOs: 370-377. Inteins suitable for use in embodiments of the present disclosure and methods for use thereof are described in U.S. Pat. No. 10,526,401, International Patent Application Publication No. WO 2013/045632, and in U.S. Patent Application Publication No. US 2020/0055900, the full disclosures of which are incorporated herein by reference in their entireties by reference for all purposes.

[1062] Further non-limiting examples of amino acid and nucleotide sequences for N-inteins and C-inteins suitable for use as intein pairs include those with at least 85% sequence identity to an amino acid or nucleotide sequence listed in the following Tables 20A-20C, or a fragments thereof that function as part of a split intein pair.

TABLE 20A
Exemplary amino acid and nucleotide sequences
for N-Inteins.

| | | SEQ |
|---|---|---|
| N- | | ID |
| Intein | Amino Acid or Nucleotide Sequence | NO |
| Cfa | TGCCTGAGCTACGATACCGAGATCCTGACCGTG | 389 |
| (GEP) | GAATACGGCTTCCTGCCTATCGGCAAGATCGTC | |
| (nucle- | GAGGAACGGATCGAGTGCACAGTGTACACCGTG | |
| otide | GATAAGAATGGCTTCGTGTACACCCAGCCTATC | |
| se- | GCTCAGTGGCACAACAGAGGCGAGCAAGAGGTG | |
| quence) | TTCGAGTACTGCCTGGAAGATGGCAGCATCATC | |
| | CGGGCCACCAAGGACCACAAGTTTATGACCACC | |
| | GACGGCCAGATGCTGCCCATCGACGAGATCTTT | |
| | GAGAGAGGCCTGGACCTGAAACAGGTGGACGGA | |
| | CTGCCT | |
| Cfa | CLSYDTEILTVEYGFLPIGKIVEERIECTVYTV | 390 |
| (GEP) | DKNGFVYTQPIAQWHNRGEQEVFEYCLEDGSII | |
| (amino | RATKDHKFMTTDGQMLPIDEIFERGLDLKQVDG | |
| acid | LP | |
| se- | | |
| quence) | | |
| Gp41.1 | TGTCTGGACCTCAAGACCCAAGTGCAGACACCT | 391 |
| (nucle- | CAGGGCATGAAAGAGATTAGCAATATCCAGGTG | |
| otide | GGCGACCTGGTCCTGAGCAACACCGGCTACAAC | |
| se- | GAGGTGCTGAACGTGTTCCCTAAGTCCAAGAAG | |
| quence) | AAATCTTATAAGATCACCCTGGAAGATGGCAAG | |
| | GAAATCATCTGCAGCGAGGAACACCTGTTCCCC | |
| | ACCCAGACCGGCGAGATGAACATCAGCGGCGGA | |
| | CTGAAGGAGGGCATGTGCCTGTACGTGAAGGAG | |
| Gp41.1 | CLDLKTQVQTPQGMKEISNIQVGDLVLSNTGYN | 392 |
| (amino | EVLNVFPKSKKKSYKITLEDGKEIICSEEHLFP | |
| acid | TQTGEMNISGGLKEGMCLYVKE | |
| se- | | |
| quence) | | |
| Gp41.8 | TGCCTGAGCCTGGACACCATGGTGGTGACAAAC | 393 |
| (nucle- | GGCAAGGCCATCGAGATCAGAGATGTGAAGGTG | |
| otide | GGAGATTGGCTGGAAAGCGAATGTGGCCCAGTG | |
| se- | CAGGTTACAGAGGTGCTGCCTATCATCAAGCAG | |
| quence) | CCTGTCTTTGAGATTGTGCTGAAAAGCGGAAAA | |
| | AAGATCCGGGTGTCCGCTAATCACAAGTTCCCC | |
| | ACCAAGGACGGCCTCAAGACCATCAACAGCGGC | |
| | CTGAAGGTGGGCGACTTCCTGAGAAGCAGAGCC | |
| | AAG | |
| Gp41.8 | CLSLDTMVVTNGKAIEIRDVKVGDWLESECGPV | 394 |
| (amino | QVTEVLPIIKQPVFEIVLKSGKKIRVSANHKFP | |
| acid | TKDGLKTINSGLKVGDFLRSRAK | |
| se- | | |
| quence) | | |
| IMPDH.1 | TGTTTTGTGCCTGGCACCCTGGTGAACACAGAG | 395 |
| (nucle- | AATGGCCTGAAGAAAATCGAGGAAATCAAGGTG | |
| otide | GGCGACAAGGTGTTCAGCCATACAGGCAAGCTG | |
| se- | CAGGAGGTGGTGGACACCCTGATCTTCGACCGG | |
| quence) | GACGAGGAAATCATCTCTATCAACGGCATTGAT | |
| | TGCACCAAGAACCACGAGTTCTACGTGATCGAT | |
| | AAGGAAAACGCTAATAGAGTGAACGAGGACAAC | |
| | ATCCACCTCTTCGCCAGATGGGTCCACGCCGAG | |
| | GAACTGGATATGAAAAAGCACCTGCTGATCGAG | |
| | CTGGAA | |
| IMPDH.1 | CFVPGTLVNTENGLKKIEEIKVGDKVFSHTGKL | 396 |
| (amino | QEVVDTLIFDRDEEIISINGIDCTKNHEFYVID | |
| acid | KENANRVNEDNIHLFARWVHAEELDMKKHLLIE | |
| se- | LE | |
| quence) | | |
| NrdJ.1 | TGCCTGGTGGGCTCTAGCGAGATTATCACAAGA | 397 |
| (nucle- | AACTACGGCAAGACCACCATCAAGGAAGTGGTC | |
| otide | GAGATCTTCGACAACGACAAGAATATCCAGGTG | |
| se- | CTGGCCTTCAACACCCACACCGATAATATCGAG | |
| quence) | TGGGCCCCTATCAAGGCCGCTCAGCTGACCAGA | |
| | CCTAACGCCGAGCTGGTTGAACTGGAAATCGAC | |
| | ACCCTGCACGGCGTGAAAACAATCCGGTGCACC | |
| | CCTGACCACCCCGTGTACACCAAGAACAGAGGC | |
| | TACGTGCGGGCCGACGAGCTGACAGATGATGAC | |
| | GAGCTCGTGGTGGCTATC | |
| NrdJ.1 | CLVGSSEIITRNYGKTTIKEVVEIFDNDKNIQV | 398 |
| (amino | LAFNTHTDNIEWAPIKAAQLTRPNAELVELEID | |
| acid | TLHGVKTIRCTPDHPVYTKNRGYVRADELTDDD | |
| se- | ELVVAI | |
| quence) | | |
| Npu | TGCCTGAGCTACGAGACAGAGATCCTGACCGTG | 399 |
| (nucle- | GAATATGGCCTGCTGCCAATCGGAAAGATCGTG | |
| otide | GAAAAGCGGATCGAGTGCACCGTCTACAGCGTG | |
| se- | GACAACAACGGAAATATCTATACACAGCCTGTG | |
| quence) | GCCCAATGGCACGACCGGGGCGAACAGGAGGTG | |
| | TTTGAGTACTGCCTGGAAGATGGTTCTCTGATT | |
| | AGAGCCACCAAGGACCACAAGTTCATGACCGTC | |
| | GACGGCCAGATGCTGCCCATCGACGAAATCTTC | |
| | GAGCGGGAACTCGACCTGATGAGAGTGGATAAC | |
| | CTGCCCAAT | |
| Npu | CLSYETEILTVEYGLLPIGKIVEKRIECTVYSV | 400 |
| (amino | DNNGNIYTQPVAQWHDRGEQEVFEYCLEDGSLI | |
| acid | RATKDHKFMTVDGQMLPIDEIFERELDLMRVDN | |
| se- | LPN | |
| quence) | | |
| Cfa N- | CLSYDTEILTVEYGFLPIGKIVEERIECTVYTV | 401 |
| intein | DKNGFVYTQPIAQWHNRGEQEVFEYCLEDGSII | |
| | RATKDHKFMTTDGQMLPIDEIFERGLDLKQVDG | |
| | LP | |
| Npu N- | CLSYETEILTVEYGLLPIGKIVEKRIECTVYSV | 402 |
| intein | DNNGNIYTQPVAQWHDRGEQEVFEYCLEDGSLI | |
| | RATKDHKFMTVDGQMLPIDEIFERELDLMRVDN | |
| | LPN | |

TABLE 20B
Further exemplary amino acid and nucleotide
sequences for N-Inteins.

| N- | | SEQ |
|---|---|---|
| Intein- | | ID |
| SC | Amino Acid or Nucleotide Sequence | NO |
| Gp41.1 | ACAAGAAGCGGATACTGTCTGGACCTCAAGACC | 413 |
| (nucle- | CAAGTGCAGACACCTCAGGGCATGAAAGAGATT | |
| otide | AGCAATATCCAGGTGGGCGACCTGGTCCTGAGC | |
| se- | AACACCGGCTACAACGAGGTGCTGAACGTGTTC | |
| quence) | CCTAAGTCCAAGAAGAAATCTTATAAGATCACC | |
| | CTGGAAGATGGCAAGGAAATCATCTGCAGCGAG | |
| | GAACACCTGTTCCCCACCCAGACCGGCGAGATG | |
| | AACATCAGCGGCGGACTGAAGGAGGGCATGTGC | |
| | CTGTACGTGAAGGAG | |
| Gp41.1 | TRSGYCLDLKTQVQTPQGMKEISNIQVGDLVLS | 414 |
| (amino | NTGYNEVLNVFPKSKKKSYKITLEDGKEIICSE | |
| acid | EHLFPTQTGEMNISGGLKEGMCLYVKE | |
| se- | | |
| quence) | | |
| Gp41.8 | TCTCAGCTGAACCGGTGCCTGAGCCTGGACACC | 415 |
| (nucle- | ATGGTGGTGACAAACGGCAAGGCCATCGAGATC | |
| otide | AGAGATGTGAAGGTGGGAGATTGGCTGGAAAGC | |
| se- | GAATGTGGCCCAGTGCAGGTTACAGAGGTGCTG | |
| quence) | CCTATCATCAAGCAGCCTGTCTTTGAGATTGTG | |
| | CTGAAAAGCGGAAAAAAGATCCGGGTGTCCGCT | |
| | AATCACAAGTTCCCCACCAAGGACGGCCTCAAG | |
| | ACCATCAACAGCGGCCTGAAGGTGGGCGACTTC | |
| | CTGAGAAGCAGAGCCAAG | |
| Gp41.8 | SQLNRCLSLDTMVVTNGKAIEIRDVKVGDWLES | 416 |
| (amino | ECGPVQVTEVLPIIKQPVFEIVLKSGKKIRVSA | |
| acid | NHKFPTKDGLKTINSGLKVGDFLRSRAK | |
| se- | | |
| quence) | | |
| IMPDH.1 | GGCATCGGCGGAGGATGTTTTGTGCCTGGCACC | 417 |
| (nucle- | CTGGTGAACACAGAGAATGGCCTGAAGAAAATC | |
| otide | GAGGAAATCAAGGTGGGCGACAAGGTGTTCAGC | |
| se- | CATACAGGCAAGCTGCAGGAGGTGGTGGACACC | |
| quence) | CTGATCTTCGACCGGGACGAGGAAATCATCTCT | |
| | ATCAACGGCATTGATTGCACCAAGAACCACGAG | |
| | TTCTACGTGATCGATAAGGAAAACGCTAATAGA | |
| | GTGAACGAGGACAACATCCACCTCTTCGCCAGA | |
| | TGGGTCCACGCCGAGGAACTGGATATGAAAAAG | |
| | CACCTGCTGATCGAGCTGGAA | |
| IMPDH.1 | GIGGGCFVPGTLVNTENGLKKIEEIKVGDKVFS | 418 |
| (amino | HTGKLQEVVDTLIFDRDEEIISINGIDCTKNHE | |
| acid | FYVIDKENANRVNEDNIHLFARWVHAEELDMKK | |
| se- | HLLIELE | |
| quence) | | |
| NrdJ.1 | GGAACAAACCCATGTTGCCTGGTGGGCTCTAGC | 419 |
| (nucle- | GAGATTATCACAAGAAACTACGGCAAGACCACC | |
| otide | ATCAAGGAAGTGGTCGAGATCTTCGACAACGAC | |
| se- | AAGAATATCCAGGTGCTGGCCTTCAACACCCAC | |
| quence) | ACCGATAATATCGAGTGGGCCCCTATCAAGGCC | |
| | GCTCAGCTGACCAGACCTAACGCCGAGCTGGTT | |
| | GAACTGGAAATCGACACCCTGCACGGCGTGAAA | |
| | ACAATCCGGTGCACCCCTGACCACCCCGTGTAC | |
| | ACCAAGAACAGAGGCTACGTGCGGGCCGACGAG | |
| | CTGACAGATGATGACGAGCTCGTGGTGGCTATC | |
| NrdJ.1 | GTNPCCLVGSSEIITRNYGKTTIKEVVEIFDND | 420 |
| (amino | KNIQVLAFNTHTDNIEWAPIKAAQLTRPNAELV | |
| acid | ELEIDTLHGVKTIRCTPDHPVYTKNRGYVRADE | |
| se- | LTDDDELVVAI | |
| quence) | | |

TABLE 20C
Exemplary amino acid and nucleotide
sequences for C-Inteins.

| | | SEQ |
|---|---|---|
| C- | Amino Acid or Nucleotide | ID |
| Intein | Sequence | NO |
| Cfa(GEP) | GTCAAGATCATCAGCAGAAAGAGCCTGGGC | 421 |
| (nucle- | ACCCAGAACGTGTACGATATCGGAGTGGGC | |
| otide | GAGCCCCACAACTTTCTGCTCAAGAATGGC | |
| se- | CTGGTGGCCAGCAAC | |
| quence) | | |
| Cfa(GEP) | VKIISRKSLGTQNVYDIGVGEPHNFLLKNG | 422 |
| (amino | LVASN | |
| acid | | |
| se- | | |
| quence) | | |
| Gp41.1 | ATGATGCTGAAAAAGATCCTGAAGATCGAG | 423 |
| (nucle- | GAACTGGATGAGAGAGAGCTGATCGACATC | |
| otide | GAAGTGTCTGGCAATCACCTGTTCTACGCC | |
| se- | AACGACATCCTGACCCACAACAGC | |
| quence) | | |
| Gp41.1 | MMLKKILKIEELDERELIDIEVSGNHLFYA | 424 |
| (amino | NDILTHNS | |
| acid | | |
| se- | | |
| quence) | | |
| Gp41.8 | ATGTGCGAAATCTTCGAGAACGAGATTGAT | 425 |
| (nucle- | TGGGACGAAATCGCCTCTATCGAGTACGTG | |
| otide | GGCGTGGAAGAGACAATCGACATCAACGTG | |
| se- | ACCAACGACAGACTGTTTTTCGCCAATGGC | |
| quence) | ATCCTGACCCACAACAGC | |
| Gp41.8 | MCEIFENEIDWDEIASIEYVGVEETIDINV | 426 |
| (amino | TNDRLFFANGILTHNS | |
| acid | | |
| se- | | |
| quence) | | |
| IMPDH.1 | ATGAAATTCAAGCTGAAGGAAATCACCAGC | 427 |
| (nucle- | ATCGAGACAAAGCACTACAAGGGCAAGGTG | |
| otide | CACGATCTGACCGTGAACCAGGACCACAGC | |
| se- | TACAACGTCAGAGGCACCGTGGTGCATAAT | |
| quence) | TCT | |
| IMPDH.1 | MKFKLKEITSIETKHYKGKVHDLTVNQDHS | 428 |
| (amino | YNVRGTVVHNS | |
| acid | | |
| se- | | |
| quence) | | |
| NrdJ.1 | ATGGAAGCCAAGACCTACATCGGCAAGCTG | 429 |
| (nucle- | AAATCTAGAAAGATCGTGTCCAACGAGGAT | |
| otide | ACATACGACATCCAGACCAGCACCCACAAT | |
| se- | TTCTTCGCCAACGACATCCTGGTGCACAAC | |
| quence) | AGC | |
| NrdJ.1 | MEAKTYIGKLKSRKIVSNEDTYDIQTSTHN | 430 |
| (amino | FFANDILVHNS | |
| acid | | |
| se- | | |
| quence) | | |
| Npu | ATGATCAAGATCGCCACAAGAAAGTACCTG | 431 |
| (nucle- | GGCAAGCAGAACGTGTACGACATCGGCGTG | |
| otide | GAGAGAGACCACAACTTCGCCCTGAAGAAC | |
| se- | GGCTTTATCGCCTCTAAT | |
| quence) | | |
| Npu | MIKIATRKYLGKQNVYDIGVERDHNFALKN | 432 |
| (amino | GFIASN | |
| acid | | |
| se- | | |
| quence) | | |
| Cfa C- | MVKIISRKSLGTQNVYDIGVGEPHNFLLKN | 433 |
| intein | GLVASN | |
| (amino | | |
| acid | | |
| se- | | |
| quence) | | |
| Npu C- | IKIATRKYLGKQNVYDIGVERDHNFALKNG | 434 |
| intein | FIASN | |
| (amino | | |
| acid | | |
| se- | | |
| quence) | | |

[1063] Intein-N and intein-C may be fused to the N-terminal portion of a split Cas9 and the C-terminal portion of the split Cas9, respectively, for the joining of the N-terminal portion of the split Cas9 and the C-terminal portion of the split Cas9. For example, in some embodiments, an intein-N is fused to the C-terminus of the N-terminal portion of the split Cas9, i.e., to form a structure of N—[N-terminal portion of the split Cas9]-[intein-N]—C. In some embodiments, an intein-C is fused to the N-terminus of the C-terminal portion of the split Cas9, i.e., to form a structure of N-[intein-C]—[C-terminal portion of the split Cas9]-C. In embodiments, a base editor is encoded by two polynucleotides, where one polynucleotide encodes a fragment of the base editor fused to an intein-N and another polynucleotide encodes a fragment of the base editor fused to an intein-C. The mechanism of intein-mediated protein splicing for joining the proteins the inteins are fused to (e.g., split Cas9) is known in the art, e.g., as described in Shah et al., Chem Sci. 2014; 5(1):446-461, incorporated herein by reference. Methods for designing and using inteins are known in the art and described, for example by WO2014004336, WO2017132580, WO2013045632A1, US20150344549, and US20180127780, each of which is incorporated herein by reference in their entirety.

[1064] In some embodiments, a portion or fragment of a nuclease (e.g., Cas9) is fused to an intein. The nuclease can be fused to the N-terminus or the C-terminus of the intein. In some embodiments, a portion or fragment of a fusion protein or complex is fused to an intein and fused to an AAV capsid protein. The intein, nuclease and capsid protein can be fused together in any arrangement (e.g., nuclease-intein-capsid, intein-nuclease-capsid, capsid-intein-nuclease, etc.). In some embodiments, an N-terminal fragment of a base editor (e.g., ABE, CBE) is fused to a split intein-N and a C-terminal fragment is fused to a split intein-C. In some embodiments, an N-terminal fragment of a base editor (e.g., ABE, CBE) is fused to a split intein-N and a C-terminal fragment is fused to a split intein-C. In some embodiments, an N-terminal fragment of a nucleic acid programmable DNA binding protein (napDNAbp) domain (e.g., Cas9) is fused to a split intein-N and a C-terminal fragment is fused to a split intein-C. In some embodiments, an N-terminal fragment of a deaminase domain (e.g. adenosine or cytidine deaminase) fused to a split intein-N and a C-terminal fragment is fused to a split intein-C.

[1065] These fragments are then packaged into two or more AAV vectors. In some embodiments, the N-terminus of an intein is fused to the C-terminus of a fusion protein and the C-terminus of the intein is fused to the N-terminus of an AAV capsid protein.

[1066] In one embodiment, inteins are utilized to join fragments or portions of a cytidine or adenosine base editor protein that is grafted onto an AAV capsid protein. The use of certain inteins for joining heterologous protein fragments is described, for example, in Wood et al., J. Biol. Chem. 289(21); 14512-9 (2014). For example, when fused to separate protein fragments, the inteins IntN and IntC recognize each other, splice themselves out and simultaneously ligate the flanking N- and C-terminal exteins of the protein fragments to which they were fused, thereby reconstituting a full-length protein from the two protein fragments. Other suitable inteins will be apparent to a person of skill in the art.

[1067] In some embodiments, an ABE was split into N- and C-terminal fragments at Ala, Ser, Thr, or Cys residues within selected regions of SpCas9. These regions correspond to loop regions identified by Cas9 crystal structure analysis.

[1068] The N-terminus of each fragment is fused to an intein-N and the C-terminus of each fragment is fused to an intein C at amino acid positions S303, T310, T313, S355, A456, S460, A463, T466, S469, T472, T474, C574, S577, A589, and S590, which are indicated in capital letters in the sequence below (called the “Cas9 reference sequence”).

| (SEQ ID NO: 197) | |
|---|---|
| 1 | mdkkysigld igtnsvgwav itdeykvpsk kfkvlgntdr hsikknliga llfdsgetae |
| 61 | atrlkrtarr rytrrknric ylqeifsnem akvddsffhr leesflveed kkherhpifg |
| 121 | nivdevayhe kyptiyhlrk klvdstdkad lrliylalah mikfrghfli egdlnpdnsd |
| 181 | vdklfiqlvq tynqlfeenp inasgvdaka ilsarlsksr rlenliaqlp gekknglfgn |
| 241 | lialslgltp nfksnfdlae daklqlskdt ydddldnlla qigdqyadlf laaknlsdai |
| 301 | llSdilrvnT eiTkaplsas mikrydehhq dltllkalvr qqlpekykei ffdqSkngya |
| 361 | gyidggasqe efykfikpil ekmdgteell vklnredllr kqrtfdngsi phqihlgelh |
| 421 | ailrrqedfy pflkdnreki ekiltfripy yvgplArgnS rfAwmTrkSe eTiTpwnfee |
| 481 | vvdkgasaqs fiermtnfdk nlpnekvlpk hsllyeyftv yneltkvkyv tegmrkpafl |
| 541 | sgeqkkaivd llfktnrkvt vkqlkedyfk kieCfdSvei sgvedrfnAS lgtyhdllki |
| 601 | ikdkdfldne enedilediv ltltlfedre mieerlktya hlfddkvmkq lkrrrytgwg |
| 661 | rlsrklingi rdkqsgktil dflksdgfan rnfmqlihdd sltfkediqk aqvsgqgdsl |
| 721 | hehianlags paikkgilqt vkvvdelvkv mgrhkpeniv iemarenqtt qkgqknsrer |
| 781 | mkrieegike lgsqilkehp ventqlqnek lylyylqngr dmyvdqeldi nrlsdydvdh |
| 841 | ivpqsflkdd sidnkvltrs dknrgksdnv pseevvkkmk nywrqllnak litqrkfdnl |
| 901 | tkaergglse ldkagfikrq lvetrqitkh vaqildsrmn tkydendkli revkvitlks |
| 961 | klvsdfrkdf qfykvreinn yhhahdayln avvgtalikk ypklesefvy gdykvydvrk |
| 1021 | miakseqeig katakyffys nimnffktei tlangeirkr plietngetg eivwdkgrdf |
| 1081 | atvrkvlsmp qvnivkktev qtggfskesi lpkrnsdkli arkkdwdpkk yggfdsptva |
| 1141 | ysvlvvakve kgkskklksv kellgitime rssfeknpid fleakgykev kkdliiklpk |
| 1201 | yslfelengr krmlasagel qkgnelalps kyvnflylas hyeklkgspe dneqkqlfve |
| 1261 | qhkhyldeii eqisefskrv iladanldkv lsaynkhrdk pireqaenii hlftltnlga |
| 1321 | paafkyfdtt idrkrytstk evldatlihq sitglyetri dlsqlggd. |

### Pharmaceutical Compositions

[1069] In some aspects, the present disclosure provides a pharmaceutical composition comprising any of the genetically modified immune cells, polynucleotides, vectors, base editors, base editor systems, guide polynucleotides, fusion proteins, complexes, or the fusion protein-guide polynucleotide complexes described herein. More specifically, provided herein are pharmaceutical compositions comprising a genetically modified allogeneic immune cell (e.g., T- or NK-cell), or a population of such immune cells, wherein said modified immune cell has at least one edited gene to provide increased persistence, resistance to immune rejection, or decreased risk of eliciting a host-versus-graft reaction, or a combination thereof. In some embodiments, the at least one edited gene is beta-2 microglobulin (β2M), Transporter Associated with Antigen Processing I (TAP1), Transporter Associated with Antigen Processing II (TAP2), and/or Tapasin. In some embodiments, TAP1 and/or TAP2 is edited. In some embodiments, beta-2 microglobulin (β2M), Transporter Associated with Antigen Processing I (TAP1), Transporter Associated with Antigen Processing II (TAP2), and/or Tapasin are edited in combination with one or more genes selected from TCRα Chain (TRAC), Cluster of Differentiation 58 (CD58), and/or Class II, Major Histocompatibility Complex Transactivator (CIITA). In some embodiments, one or more inhibitory receptors selected from Human Leukocyte Antigen-E (HLA-E), Human Leukocyte Antigen-G (HLA-G), Programmed Death Ligand 1 (PD-L1), and/or Cluster of Differentiation 47 (CD47) are overexpressed in the genetically modified allogeneic immune cell (e.g., T- or NK-cell).

[1070] In some cases, a composition of the disclosure contains a delivery vehicle (e.g., a vector, such as a lipid nanoparticle or a viral vector).

[1071] In embodiments, a pharmaceutical composition of the disclosure comprises a modified immune cell that has a reduced level of, lacks, or has virtually undetectable levels of one or more of the polypeptides listed herein.

[1072] The pharmaceutical compositions of the present disclosure can be prepared in accordance with known techniques. See, e.g., Remington, The Science And Practice of Pharmacy (21st ed. 2005). In general, the cell, or population thereof is admixed with a suitable carrier prior to administration or storage, and in some embodiments, the pharmaceutical composition further comprises a pharmaceutically acceptable carrier. Suitable pharmaceutically acceptable carriers generally comprise inert substances that aid in administering the pharmaceutical composition to a subject, aid in processing the pharmaceutical compositions into deliverable preparations, or aid in storing the pharmaceutical composition prior to administration. Pharmaceutically acceptable carriers can include agents that can stabilize, optimize or otherwise alter the form, consistency, viscosity, pH, pharmacokinetics, solubility of the formulation. Such agents include buffering agents, wetting agents, emulsifying agents, diluents, encapsulating agents, and skin penetration enhancers. For example, carriers can include, but are not limited to, saline, buffered saline, dextrose, arginine, sucrose, water, glycerol, ethanol, sorbitol, dextran, sodium carboxymethyl cellulose, and combinations thereof.

[1073] Some nonlimiting examples of materials which can serve as pharmaceutically-acceptable carriers include: (1) sugars, such as lactose, glucose and sucrose; (2) starches, such as corn starch and potato starch; (3) cellulose, and its derivatives, such as sodium carboxymethyl cellulose, methylcellulose, ethyl cellulose, microcrystalline cellulose and cellulose acetate; (4) powdered tragacanth; (5) malt; (6) gelatin; (7) lubricating agents, such as magnesium stearate, sodium lauryl sulfate and talc; (8) excipients, such as cocoa butter and suppository waxes; (9) oils, such as peanut oil, cottonseed oil, safflower oil, sesame oil, olive oil, corn oil and soybean oil; (10) glycols, such as propylene glycol; (11) polyols, such as glycerin, sorbitol, mannitol and polyethylene glycol (PEG); (12) esters, such as ethyl oleate and ethyl laurate; (13) agar; (14) buffering agents, such as magnesium hydroxide and aluminum hydroxide; (15) alginic acid; (16) pyrogen-free water; (17) isotonic saline; (18) Ringer's solution; (19) ethyl alcohol; (20) pH buffered solutions; (21) polyesters, polycarbonates and/or polyanhydrides; (22) bulking agents, such as polypeptides and amino acids (23) serum alcohols, such as ethanol; and (23) other non-toxic compatible substances employed in pharmaceutical formulations. Wetting agents, coloring agents, release agents, coating agents, sweetening agents, flavoring agents, perfuming agents, preservative and antioxidants can also be present in the formulation.

[1074] Pharmaceutical compositions can comprise one or more pH buffering compounds to maintain the pH of the formulation at a predetermined level that reflects physiological pH, such as in the range of about 5.0 to about 8.0. The pH buffering compound used in the aqueous liquid formulation can be an amino acid or mixture of amino acids, such as histidine or a mixture of amino acids such as histidine and glycine. Alternatively, the pH buffering compound is preferably an agent which maintains the pH of the formulation at a predetermined level, such as in the range of about 5.0 to about 8.0, and which does not chelate calcium ions. Illustrative examples of such pH buffering compounds include, but are not limited to, imidazole and acetate ions. The pH buffering compound may be present in any amount suitable to maintain the pH of the formulation at a predetermined level.

[1075] Pharmaceutical compositions can also contain one or more osmotic modulating agents, i.e., a compound that modulates the osmotic properties (e.g., tonicity, osmolality, and/or osmotic pressure) of the formulation to a level that is acceptable to the blood stream and blood cells of recipient individuals. The osmotic modulating agent can be an agent that does not chelate calcium ions. The osmotic modulating agent can be any compound known or available to those skilled in the art that modulates the osmotic properties of the formulation. One skilled in the art may empirically determine the suitability of a given osmotic modulating agent for use in the inventive formulation. Illustrative examples of suitable types of osmotic modulating agents include, but are not limited to: salts, such as sodium chloride and sodium acetate; sugars, such as sucrose, dextrose, and mannitol; amino acids, such as glycine; and mixtures of one or more of these agents and/or types of agents. The osmotic modulating agent(s) may be present in any concentration sufficient to modulate the osmotic properties of the formulation.

[1076] In addition to a modified immune cell, or population thereof, and a carrier, the pharmaceutical compositions of the present disclosure can include at least one additional therapeutic agent useful in the treatment of disease. For example, some embodiments of the pharmaceutical composition described herein further comprises a chemotherapeutic agent. In some embodiments, the pharmaceutical composition further comprises a cytokine peptide or a nucleic acid sequence encoding a cytokine peptide. In some embodiments, the pharmaceutical compositions comprising the modified immune cell or population thereof can be administered separately from an additional therapeutic agent.

[1077] One consideration concerning the therapeutic use of genetically modified cells of the present disclosure is the quantity of cells necessary to achieve an optimal or satisfactory effect. The quantity of cells to be administered may vary for the subject being treated. In one embodiment, between 10⁴ to 10¹⁰, between 10⁵ to 10⁹, or between 10⁶ and 10⁸ genetically modified cells of the present disclosure are administered to a human subject. In some embodiments, at least about 1×10⁸, 2×10⁸, 3×10⁸, 4×10⁸, and 5×10⁸ genetically modified immune cells of the present disclosure are administered to a human subject. Determining the precise effective dose may be based on factors for each individual subject, including their size, age, sex, weight, and condition. Dosages can be readily ascertained by those skilled in the art from this disclosure and the knowledge in the art.

[1078] The skilled artisan can readily determine the number of cells and amount of optional additives, vehicles, and/or carriers in compositions and to be administered in methods of the present disclosure. Typically, additives (in addition to the cell(s)) are present in an amount of 0.001 to 50% (weight) solution in phosphate buffered saline, and the active ingredient is present in the order of micrograms to milligrams, such as about 0.0001 to about 5 wt %, preferably about 0.0001 to about 1 wt %, still more preferably about 0.0001 to about 0.05 wt % or about 0.001 to about 20 wt %, preferably about 0.01 to about 10 wt %, and still more preferably about 0.05 to about 5 wt %. Of course, for any composition to be administered to an animal or human, and for any particular method of administration, it is preferred to determine therefore: toxicity, such as by determining the lethal dose (LD) and LD50 in a suitable animal model (e.g., a rodent such as a mouse); and, the dosage of the composition(s), concentration of components therein, and the timing of administering the composition(s), which elicit a suitable response. Such determinations do not require undue experimentation from the knowledge of the skilled artisan, this disclosure and the documents cited herein. And, the time for sequential administrations can be ascertained without undue experimentation.

[1079] In some embodiments, the pharmaceutical composition is formulated for delivery to a subject. Suitable routes of administrating the pharmaceutical composition described herein include, without limitation: topical, subcutaneous, transdermal, intradermal, intralesional, intraarticular, intraperitoneal, intravesical, transmucosal, gingival, intradental, intracochlear, transtympanic, intraorgan, epidural, intrathecal, intramuscular, intravenous, intravascular, intraosseus, periocular, intratumoral, intracerebral, and intracerebroventricular administration.

[1080] In some embodiments, the pharmaceutical composition described herein is administered locally to a diseased site. In some embodiments, the pharmaceutical composition described herein is administered to a subject by injection, by means of a catheter, by means of a suppository, or by means of an implant, the implant being of a porous, non-porous, or gelatinous material, including a membrane, such as a sialastic membrane, or a fiber.

[1081] In other embodiments, the pharmaceutical composition described herein is delivered in a controlled release system. In one embodiment, a pump can be used (see, e.g., Langer, 1990, Science 249: 1527-1533; Sefton, 1989, CRC Crit. Ref. Biomed. Eng. 14:201; Buchwald et al., 1980, Surgery 88:507; Saudek et al., 1989, N. Engl. J. Med. 321:574). In another embodiment, polymeric materials can be used. (See, e.g., Medical Applications of Controlled Release (Langer and Wise eds., CRC Press, Boca Raton, Fla., 1974); Controlled Drug Bioavailability, Drug Product Design and Performance (Smolen and Ball eds., Wiley, New York, 1984); Ranger and Peppas, 1983, Macromol. Sci. Rev. Macromol. Chem. 23:61. See also Levy et al., 1985, Science 228: 190; During et al., 1989, Ann. Neurol. 25:351; Howard et al., 1989, J. Neurosurg. 71: 105.) Other controlled release systems are discussed, for example, in Langer, supra.

[1082] In some embodiments, the pharmaceutical composition is formulated in accordance with routine procedures as a composition adapted for intravenous or subcutaneous administration to a subject, e.g., a human. In some embodiments, pharmaceutical composition for administration by injection are solutions in sterile isotonic use as solubilizing agent and a local anesthetic such as lignocaine to ease pain at the site of the injection. Generally, the ingredients are supplied either separately or mixed together in unit dosage form, for example, as a dry lyophilized powder or water free concentrate in a hermetically sealed container such as an ampoule or sachette indicating the quantity of active agent. Where the pharmaceutical is to be administered by infusion, it can be dispensed with an infusion bottle containing sterile pharmaceutical grade water or saline. Where the pharmaceutical composition is administered by injection, an ampoule of sterile water for injection or saline can be provided so that the ingredients can be mixed prior to administration.

[1083] A pharmaceutical composition for systemic administration can be a liquid, e.g., sterile saline, lactated Ringer's or Hank's solution. In addition, the pharmaceutical composition can be in solid forms and re-dissolved or suspended immediately prior to use. Lyophilized forms are also contemplated. The pharmaceutical composition can be contained within a lipid particle or vesicle, such as a liposome or microcrystal, which is also suitable for parenteral administration. The particles can be of any suitable structure, such as unilamellar or plurilamellar, so long as compositions are contained therein. Compounds can be entrapped in “stabilized plasmid-lipid particles” (SPLP) containing the fusogenic lipid dioleoylphosphatidylethanolamine (DOPE), low levels (5-10 mol %) of cationic lipid, and stabilized by a polyethylenegly col (PEG) coating (Zhang Y. P. et al., Gene Ther. 1999, 6: 1438-47). Positively charged lipids such as N-[1-(2,3-dioleoyloxi)propyl]-N,N,N-trimethyl-amoniummethylsulfate, or “DOTAP,” are particularly preferred for such particles and vesicles. The preparation of such lipid particles is well known. See, e.g., U.S. Pat. Nos. 4,880,635; 4,906,477; 4,911,928; 4,917,951; 4,920,016; and 4,921,757; each of which is incorporated herein by reference.

[1084] The pharmaceutical composition described herein can be administered or packaged as a unit dose, for example. The term “unit dose” when used in reference to a pharmaceutical composition of the present disclosure refers to physically discrete units suitable as unitary dosage for the subject, each unit containing a predetermined quantity of active material calculated to produce the desired therapeutic effect in association with the required diluent; i.e., carrier, or vehicle.

[1085] Further, the pharmaceutical composition can be provided as a pharmaceutical kit comprising (a) a container containing a compound of the present disclosure in lyophilized form and (b) a second container containing a pharmaceutically acceptable diluent (e.g., sterile used for reconstitution or dilution of the lyophilized compound of the present disclosure. Optionally associated with such container(s) can be a notice in the form prescribed by a governmental agency regulating the manufacture, use or sale of pharmaceuticals or biological products, which notice reflects approval by the agency of manufacture, use or sale for human administration.

[1086] In another aspect, an article of manufacture containing materials useful for the treatment of the diseases described above is included. In some embodiments, the article of manufacture comprises a container and a label. Suitable containers include, for example, bottles, vials, syringes, and test tubes. The containers can be formed from a variety of materials such as glass or plastic. In some embodiments, the container holds a composition that is effective for treating a disease described herein and can have a sterile access port. For example, the container can be an intravenous solution bag or a vial having a stopper pierceable by a hypodermic injection needle. The active agent in the composition is a compound of the present disclosure. In some embodiments, the label on or associated with the container indicates that the composition is used for treating the disease of choice. The article of manufacture can further comprise a second container comprising a pharmaceutically-acceptable buffer, such as phosphate-buffered saline, Ringer's solution, or dextrose solution. It can further include other materials desirable from a commercial and user standpoint, including other buffers, diluents, filters, needles, syringes, and package inserts with instructions for use.

[1087] In some embodiments, any of the fusion proteins, gRNAs, and/or complexes described herein are provided as part of a pharmaceutical composition. In some embodiments, the pharmaceutical composition comprises any of the fusion proteins or complexes provided herein. In some embodiments, the pharmaceutical composition comprises any of the complexes provided herein. In some embodiments, the pharmaceutical composition comprises a ribonucleoprotein complex comprising an RNA-guided nuclease (e.g., Cas9) that forms a complex with a gRNA and a cationic lipid. In some embodiments pharmaceutical composition comprises a gRNA, a nucleic acid programmable DNA binding protein, a cationic lipid, and a pharmaceutically acceptable excipient. In embodiments, pharmaceutical compositions comprise a lipid nanoparticle and a pharmaceutically acceptable excipient. In embodiments, the lipid nanoparticle contains a gRNA, a base editor, a complex, a base editor system, or a component thereof of the present disclosure, and/or one or more polynucleotides encoding the same. Pharmaceutical compositions can optionally comprise one or more additional therapeutically active substances.

[1088] In some embodiments, compositions provided herein are administered to a subject, for example, to a human subject, in order to effect a targeted genomic modification within the subject. In some embodiments, cells are obtained from the subject and contacted with any of the pharmaceutical compositions provided herein. In some embodiments, cells removed from a subject and contacted ex vivo with a pharmaceutical composition are re-introduced into the subject, optionally after the desired genomic modification has been effected or detected in the cells. Methods of delivering pharmaceutical compositions comprising nucleases are known, and are described, for example, in U.S. Pat. Nos. 6,453,242; 6,503,717; 6,534,261; 6,599,692; 6,607,882; 6,689,558; 6,824,978; 6,933,113; 6,979,539; 7,013,219; and 7,163,824, the disclosures of all of which are incorporated by reference herein in their entireties. Although the descriptions of pharmaceutical compositions provided herein are principally directed to pharmaceutical compositions which are suitable for administration to humans, it will be understood by the skilled artisan that such compositions are generally suitable for administration to animals or organisms of all sorts, for example, for veterinary use.

[1089] Modification of pharmaceutical compositions suitable for administration to humans in order to render the compositions suitable for administration to various animals is well understood, and the ordinarily skilled veterinary pharmacologist can design and/or perform such modification with merely ordinary, if any, experimentation. Subjects to which administration of the pharmaceutical compositions is contemplated include, but are not limited to, humans and/or other primates; mammals, domesticated animals, pets, and commercially relevant mammals such as cattle, pigs, horses, sheep, cats, dogs, mice, and/or rats; and/or birds, including commercially relevant birds such as chickens, ducks, geese, and/or turkeys.

[1090] Formulations of the pharmaceutical compositions described herein can be prepared by any method known or hereafter developed in the art of pharmacology. In general, such preparatory methods include the step of bringing the active ingredient(s) into association with an excipient and/or one or more other accessory ingredients, and then, if necessary and/or desirable, shaping and/or packaging the product into a desired single- or multi-dose unit. Pharmaceutical formulations can additionally comprise a pharmaceutically acceptable excipient, which, as used herein, includes any and all solvents, dispersion media, diluents, or other liquid vehicles, dispersion or suspension aids, surface active agents, isotonic agents, thickening or emulsifying agents, preservatives, solid binders, lubricants and the like, as suited to the particular dosage form desired. Remington's The Science and Practice of Pharmacy, 21st Edition, A. R. Gennaro (Lippincott, Williams & Wilkins, Baltimore, MD, 2006; incorporated in its entirety herein by reference) discloses various excipients used in formulating pharmaceutical compositions and known techniques for the preparation thereof. See also PCT application PCT/US2010/055131 (Publication number WO2011/053982 A8, filed Nov. 2, 2010), incorporated in its entirety herein by reference, for additional suitable methods, reagents, excipients and solvents for producing pharmaceutical compositions comprising a nuclease.

[1091] Except insofar as any conventional excipient medium is incompatible with a substance or its derivatives, such as by producing any undesirable biological effect or otherwise interacting in a deleterious manner with any other component(s) of the pharmaceutical composition, its use is contemplated to be within the scope of this disclosure.

[1092] The compositions, as described above, can be administered in effective amounts. The effective amount will depend upon the mode of administration, the particular condition being treated, and the desired outcome. It may also depend upon the stage of the condition, the age and physical condition of the subject, the nature of concurrent therapy, if any, and like factors well-known to the medical practitioner. For therapeutic applications, it is that amount sufficient to achieve a medically desirable result.

[1093] In some embodiments, compositions in accordance with the present disclosure can be used for treatment of any of a variety of diseases, disorders, and/or conditions. In some embodiments, the pharmaceutical compositions of the present disclosure can be used to treat any disease or condition that is responsive to autologous or allogeneic immune cell immunotherapy. In some embodiments, the modified immune cell is administered to an allogenic host, wherein the modified immune cell has no rejection by the host. In some embodiments, the allogenic modified immune cell induces negligible or minimum rejection by the host.

### Methods of Treatment

[1094] Some aspects of the present disclosure provide methods of treating a subject in need, the method comprising administering to a subject in need an effective therapeutic amount of a pharmaceutical composition as described herein. More specifically, the methods of treatment include administering to a subject in need thereof one or more pharmaceutical compositions comprising one or more cells having at least one edited gene. In other embodiments, the methods of the present disclosure comprise expressing or introducing into a cell a base editor polypeptide and one or more guide RNAs capable of targeting a nucleic acid molecule encoding at least one polypeptide. In some embodiments, the methods of treatment comprise administering to a subject in need thereof a pharmaceutical composition comprising a population of modified immune cells having at least one edited gene (e.g., beta-2 microglobulin (β2M), Transporter Associated with Antigen Processing I (TAP1), Transporter Associated with Antigen Processing II (TAP2), Tapasin, and/or CD58), wherein the at least one edited gene reduces or inactivates surface HLA class-I expression and provides increased persistence, resistance to immune rejection, or decreased risk of eliciting a host-versus-graft reaction, or a combination thereof. In some embodiments, the modified immune cell is an allogeneic immune cell.

[1095] In some embodiments, the methods of treatment comprise administering to a subject an effective amount of a modified immune effector cell (e.g., allogeneic modified immune cell) or a population thereof that has at least one single target nucleobase modification in one or more of a beta-2 microglobulin (β2M), Transporter Associated with Antigen Processing I (TAP1), Transporter Associated with Antigen Processing II (TAP2), Tapasin, and/or CD58 gene sequence and, in some embodiments, further has reduced or inactivated surface HLA class-I expression. In some embodiments, the modified immune effector cell further overexpresses one or more inhibitory receptors selected from Human Leukocyte Antigen-E (HLA-E), Human Leukocyte Antigen-G (HLA-G), Programmed Death Ligand 1 (PD-L1), and/or Cluster of Differentiation 47 (CD47). In some embodiments, the modified immune cell further overexpresses inhibitory receptors Human Leukocyte Antigen-E (HLA-E), Human Leukocyte Antigen-G (HLA-G), Programmed Death Ligand 1 (PD-L1), and Cluster of Differentiation 47 (CD47). In some embodiments, the modified immune effector cell (e.g., allogeneic modified immune cell) further has at least one single target nucleobase modification in a nucleic acid molecule encoding at least one additional gene sequence or regulatory element thereof. In some embodiments, the at least one additional gene sequence or regulatory element is TCRα Chain (TRAC), Cluster of Differentiation 58 (CD58), and/or Class II, Major Histocompatibility Complex Transactivator (CIITA).

[1096] In one embodiment, a subject is administered at least 0.1×10⁵ cells, at least 0.5×10⁵ cells, at least 1×10⁵ cells, at least 5×10⁵ cells, at least 1×10⁶ cells, at least 0.5×10⁷ cells, at least 1×10⁷ cells, at least 0.5×10⁸ cells, at least 1×10⁸ cells, at least 0.5×10⁹ cells, at least 1×10⁹ cells, at least 2×10⁹ cells, at least 3×10⁹ cells, at least 4×10⁹ cells, at least 5×10⁹ cells, or at least 1×10¹⁰ cells. In particular embodiments, about 1×10⁷ cells to about 1×10⁹ cells, about 2×10⁷ cells to about 0.9×10⁹ cells, about 3×10⁷ cells to about 0.8×10⁹ cells, about 4×10⁷ cells to about 0.7×10⁹ cells, about 5×10⁷ cells to about 0.6×10⁹ cells, or about 5×10⁷ cells to about 0.5×10⁹ cells are administered to the subject.

[1097] In one embodiment, a subject is administered at least 0.1×10⁴ cells/kg of bodyweight, at least 0.5×10⁴ cells/kg of bodyweight, at least 1×10⁴ cells/kg of bodyweight, at least 5×10⁴ cells/kg of bodyweight, at least 1×10⁵ cells/kg of bodyweight, at least 0.5×10⁶ cells/kg of bodyweight, at least 1×10⁶ cells/kg of bodyweight, at least 0.5×10⁷ cells/kg of bodyweight, at least 1×10⁷ cells/kg of bodyweight, at least 0.5×10⁸ cells/kg of bodyweight, at least 1×10⁸ cells/kg of bodyweight, at least 2×10⁸ cells/kg of bodyweight, at least 3×10⁸ cells/kg of bodyweight, at least 4×10⁸ cells/kg of bodyweight, at least 5×10⁸ cells/kg of bodyweight, or at least 1×10⁹ cells/kg of bodyweight. In particular embodiments, about 1×10⁶ cells/kg of bodyweight to about 1×10⁸ cells/kg of bodyweight, about 2×10⁶ cells/kg of bodyweight to about 0.9×10⁸ cells/kg of bodyweight, about 3×10⁶ cells/kg of bodyweight to about 0.8×10⁸ cells/kg of bodyweight, about 4×10⁶ cells/kg of bodyweight to about 0.7×10⁸ cells/kg of bodyweight, about 5×10⁶ cells/kg of bodyweight to about 0.6×10⁸ cells/kg of bodyweight, or about 5×10⁶ cells/kg of bodyweight to about 0.5×10⁸ cells/kg of bodyweight are administered to the subject.

[1098] One of ordinary skill in the art would recognize that multiple administrations of the pharmaceutical compositions contemplated in particular embodiments may be required to affect the desired therapy. For example, a composition may be administered to the subject 1, 2, 3, 4, 5, 6, 7, 8, 9, or 10 or more times over a span of 1 week, 2 weeks, 3 weeks, 1 month, 2 months, 3 months, 4 months, 5 months, 6 months, 1 year, 2 years, 5, years, 10 years, or more. In any of such methods, the methods may comprise administering to the subject an effective amount of a modified immune cell or a base editor system or polynucleotide encoding such system. In any of such methods, the methods may comprise administering one or more doses of an effective amount of the modified immune cells per day. In any of such methods, the methods may comprise administering two or more doses of an effective amount of the modified immune cells per day. In any of such methods, the methods may comprise administering three or more doses of an effective amount of the modified immune cells per day. In any of such methods, the methods may comprise administering one or more doses of an effective amount of the modified immune cells per week. In any of such methods, the methods may comprise administering two or more doses of an effective amount of the modified immune cells per week. In any of such methods, the methods may comprise administering three or more doses of an effective amount of the modified immune cells per week. In any of such methods, the methods may comprise administering one or more doses of an effective amount of the modified immune cells per month. In any of such methods, the methods may comprise administering two or more doses of an effective amount of the modified immune cells per month. In any of such methods, the methods may comprise administering three or more doses of an effective amount of the modified immune cells per month.

[1099] Administration of the pharmaceutical compositions contemplated herein may be carried out using conventional techniques including, but not limited to, infusion, transfusion, or parenterally. In some embodiments, parenteral administration includes infusing or injecting intravascularly, intravenously, intramuscularly, intraarterially, intrathecally, intratumorally, intradermally, intraperitoneally, transtracheally, subcutaneously, subcuticularly, intraarticularly, subcapsularly, subarachnoidly and intrasternally.

[1100] In some embodiments, a composition described herein (e.g., edited cell, base editor system) is administered in a dosage that is about 0.5-30 mg per kilogram body weight of the human subject. In another embodiment, the amount of the composition administered is about 0.5-20 mg per kilogram body weight of the human subject. In another embodiment, the amount of the composition administered is about 0.5-10 mg per kilogram body weight of the human subject. In another embodiment, the amount of the composition administered is about 0.04 mg, about 0.08 mg, about 0.16 mg, about 0.32 mg, about 0.64 mg, about 1.25 mg, about 1.28 mg, about 1.92 mg, about 2.5 mg, about 3.56 mg, about 3.75 mg, about 5.0 mg, about 7.12 mg, about 7.5 mg, about 10 mg, about 14.24 mg, about 15 mg, about 20 mg, or about 30 mg per kilogram body weight of the human subject. In another embodiment, the amount of the compo composition und administered is about 1.92 mg, about 3.75 mg, about 7.5 mg, about 15.0 mg, or about 30.0 mg per kilogram body weight of the human subject and the composition is administered two times a week. In another embodiment, the amount of the composition administered is about 1.28 mg, about 2.56 mg, about 5.0 mg, about 10 mg, or about 20 mg per kilogram body weight of the human subject and the composition is administered two times a week. In another embodiment, the amount of the composition administered is about 1.92 mg, about 3.75 mg, about 7.5 mg, about 15.0 mg, or about 30.0 mg per kilogram body weight of the human subject and the composition is administered once a week. In another embodiment, the amount of the composition administered is about 1.28 mg, about 2.56 mg, about 5.0 mg, about 10 mg, or about 20 mg per kilogram body weight of the human subject and the composition is administered once a week. In another embodiment, the amount of the composition administered is about 1.92 mg, about 3.75 mg, about 7.5 mg, about 15.0 mg, or about 30.0 mg per kilogram body weight of the human subject and the composition is administered once a day three, five or seven times in a seven day period. In another embodiment, the composition is administered intravenously once a day, seven times in a seven day period. In another embodiment, the amount of the composition administered is about 1.28 mg, about 2.56 mg, about 5.0 mg, about 10 mg, or about 20 mg per kilogram body weight of the human subject and the composition is administered once a day three, five or seven times in a seven day period. In another embodiment, the composition is administered intravenously once a day, seven times in a seven day period.

[1101] In some embodiments, the composition is administered over a period of 0.25 h, 0.5 h, 1 h, 2 h, 3 h, 4 h, 5 h, 6 h, 7 h, 8 h, 9 h, 10 h, 11 h, or 12 h. In another embodiment, the composition is administered over a period of 0.25-2 h. In another embodiment, the composition is gradually administered over a period of 1 h. In another embodiment, the composition is gradually administered over a period of 2 h.

### Kits

[1102] The present disclosure provides kits featuring an allogeneic modified immune cell (e.g., T- or NK-cell) as provided herein. In some embodiments, the kit includes an allogeneic modified CAR-T cell as provided herein. In some embodiments, the kit further includes a base editor, base editor system or a polynucleotide encoding a base editor or base editor system as provided herein. In some embodiments, the kit further includes one or more guide polynucleotides (e.g., a guide polynucleotide targeting a genomic sequence) as provided herein. In some embodiments, the base editor system comprises a nucleic acid programmable DNA binding protein (napDNAbp), a deaminase (e.g., cytidine deaminase or adenosine deaminase), and a guide RNA for modifying an allogeneic CAR-T cell. In some embodiments, the napDNAbp is Cas9 or Cas12. In some embodiments, the polynucleotide encoding the base editor is a mRNA sequence. In some embodiments, the deaminase is a cytidine deaminase or an adenosine deaminase. In some embodiments, the base editor is an ABE, CBE or CABE. In some embodiments, the guide RNA is selected from Table TA or Table 1B. In various instances, the kit comprises an edited cell and instructions regarding the use of such cell.

[1103] The kits may further comprise written instructions for using the base editor, base editor system and/or allogeneic modified immune cell as described herein. In other embodiments, the instructions include at least one of the following: precautions; warnings; clinical studies; and/or references. The instructions may be printed directly on the container (when present), or as a label applied to the container, or as a separate sheet, pamphlet, card, or folder supplied in or with the container. In a further embodiment, a kit can comprise instructions in the form of a label or separate insert (package insert) for suitable operational parameters. In yet another embodiment, the kit can comprise one or more containers with appropriate positive and negative controls or control samples, to be used as standard(s) for detection, calibration, or normalization. The kit can further comprise a second container comprising a pharmaceutically-acceptable buffer, such as (sterile) phosphate-buffered saline, Ringer's solution, or dextrose solution. It can further include other materials desirable from a commercial and user standpoint, including other buffers, diluents, filters, needles, syringes, and package inserts with instructions for use.

[1104] The practice of the present invention employs, unless otherwise indicated, conventional techniques of molecular biology (including recombinant techniques), microbiology, cell biology, biochemistry and immunology, which are well within the purview of the skilled artisan. Such techniques are explained fully in the literature, such as, “Molecular Cloning: A Laboratory Manual”, second edition (Sambrook, 1989); “Oligonucleotide Synthesis” (Gait, 1984); “Animal Cell Culture” (Freshney, 1987); “Methods in Enzymology” “Handbook of Experimental Immunology” (Weir, 1996); “Gene Transfer Vectors for Mammalian Cells” (Miller and Calos, 1987); “Current Protocols in Molecular Biology” (Ausubel, 1987); “PCR: The Polymerase Chain Reaction”, (Mullis, 1994); “Current Protocols in Immunology” (Coligan, 1991). These techniques are applicable to the production of the polynucleotides and polypeptides of the present disclosure, and, as such, may be considered in making and practicing the invention. Particularly useful techniques for particular embodiments will be discussed in the sections that follow.

[1105] The following examples are put forth so as to provide those of ordinary skill in the art with a complete disclosure and description of how to make and use the assay, screening, and therapeutic methods of the present disclosure, and are not intended to limit the scope of what the inventors regard as their invention.

### EXAMPLES

### Example 1: Engineered Persistent Allogeneic T Cells

[1106] Pre-clinical and clinical data suggest that adoptively transferred allogeneic CAR-T cells exhibit poor persistence in vivo due to recipient/host immune-mediated rejection mechanisms. Host-derived alloreactive T cells recognize allogeneic CAR-T cells as “non-self” by binding to peptide complexed with foreign Human Leukocyte Antigen (HLA) on the surface of CAR-T cells. Approaches to render allogeneic CAR-T cells invisible to host-derived alloreactive T cells include genetic ablation of beta-2-Microglobulin (β2M). β2M forms a heterotrimer with HLA class-I heavy chain and class-I specific peptide to enable antigen presentation to surveilling T cells. However, the presence of surface peptide/HLA class-I negatively regulates Natural Killer (NK) cells by engaging inhibitory Killer Ig-Like Receptors (KIRs). As such, the absence of surface HLA on cells leaves them susceptible to NK cell-mediated lysis.

[1107] Generating HLA-deficient allogeneic CAR-T cells can overcome host-derived alloreactive T cell-mediated rejection, however, the likelihood exists that the CAR-T cells will be eliminated by other arms of the host immune system, namely NK cells. In order to overcome this obstacle, surface peptide/HLA expression will be attenuated on allogeneic CAR-T cells to a level that is below the threshold to activate host-derived alloreactive T cells and above the threshold to inhibit host-derived NK cells. Cellular targets for genetic disruption include components of the Peptide Loading Complex (PLC), such as TAP1, TAP2, Tapasin, and β2M (FIG. 1). Members of the PLC are responsible for proper assembly of mature peptide/HLA class-I complexes. Naturally occurring mutations have been described within genes encoding for proteins of the PLC that can modulate surface peptide/HLA class-I expression. For instance, individuals with Bare Lymphocyte Syndrome (BLS) Type I exhibit a marked reduction, but not complete ablation, of surface HLA expression.

[1108] To test whether base editing modulates surface HLA class-I expression, splice sites were targeted for base editing using a rBE4 base editor and guide RNAs 443-465 for TAP1 and guide RNAs 466-489 for TAP2 (Table TA). Base edits in TAP1 resulted in near ablation of surface HLA class-I expression using β2M gRNA as a complete knock-out control, while base edits in TAP2 show attenuation of surface HLA class-I expression (see FIGS. 2A, 2B, 3A, 3B). Overall, these data support that TAP1 and TAP2 base editing modulates surface HLA class-I expression.

### Example 2: Materials & Methods

[1109] Modified guides (3X 2′-O-methyl 3′-phosphorothioate 5′ and 3′; commercially available from Agilent) were used for screening purposes. Guides were reconstituted in RNAse free water at 2 μg/μL and frozen prior to screening. mRNA encoding the rBE4 base editor was aliquoted at 2 μg/μL and frozen prior to screening.

[1110] Human primary T cells were isolated and activated at 1×10⁶ cells/mL using TransAct (1:100). T cells were activated in serum free media (XF T Cell Expansion Media+10% CTS Immune Cell SR+1% glutamax+1% HEPEs+IL7/IL15). Three (3) days post activation the cells were used for guide screening. A standard Lonza nucleofection protocol was followed (20 μL cassettes): T cells were counted, eluted into P3 buffer with supplement, and screened using 2 μg/μL of CBE mRNA editor and 2 μg/μL of guide per 0.750-1×10⁶ cells/20 μL reaction using standard DH102 protocol. A reliable β2M guide was used as a control for editing efficiency and comparison for the TAP1 and TAP2 guides. After electroporation, cells were plated in 24 well plates in standard serum free media. 72 hours post electroporation, a subset of cells was removed into a 96 well plate, and stained for β2M expression using a flow cytometer, the MQ16 Flow analyzer. Data was analyzed using a commercially available software package for flow cytometry analysis (FlowJo).

### Example 3: Engineered NK Cell Resistant K562 Cells

[1111] NK cells exhibit a variegated pattern of inhibitory receptors. In order to investigate whether a cell line could be engineered to suppress NK cell lysis in vitro, inhibitory receptors CD47, PD-L1, HLA-G, or HLA-E were overexpressed in K562 cells, which have no surface HLA expression and are susceptible to NK cell lysis (FIG. 4A). Wild-type was used as a control. Expression of each receptor alone did not suppress NK cell lysis as compared to wild-type. To determine if multiple inhibitory receptors would suppress NK cell lysis, all four inhibitory receptors CD47, PD-L1, HLA-G, and HLA-E (K.Quad) were overexpressed in K562 cells (FIG. 4B). NK cell resistance was observed when overexpressing all four receptors in K562 cells.

### Example 4: BLT Humanized Murine Model

[1112] A BLT humanized murine model (NOD/SCID/IL2γc^{-/-} (NSG) mice; Ragon Institute (see FIG. 34) was used to measure the rejection rates of engrafted allogeneic T cells. BLT humanized mice recapitulate both T cell and NK cell mediated allorejection and, therefore, represent a model system for evaluating allogeneic evasion strategies in vivo. To validate the model, T cells were isolated from both syngeneic BLT humanized mice (iRFP670+ cells) and peripheral blood mononuclear cells (PBMCs) of an allogeneic de-identified human donor (GFP+) (FIG. 5A). BLT mice were infused with a mixture (1:1 ratio) of syngeneic BLT-derived T cells and huPBMC-derived T cells.

[1113] Persistence of allogeneic cells (GFP) to syngeneic cells (iRFP670) was measured at one (1), five (5), and fourteen (14) days post-infusion (FIGS. 5B and 5C). Individual CAR⁺ populations (#305, #308, or #309) out of the total CAR⁺ (%) of allogeneic cells (GFP) and syngeneic cells (iRFP⁺) was also measured at one (1), five (5), fourteen (14), and twenty-one (21) days post-infusion. By day fourteen (14), allogeneic T cells were cleared, whereas syngeneic T cells persisted indicating that the mode of regulation in the BLT murine model was T-cell mediated.

[1114] To determine if this result was tissue specific, the presence of allogeneic (GFP) and syngeneic (iRFP670) CAR-T cells was measured in multiple tissue types, including bone marrow, lymph node, liver and spleen in comparison to CD4 (BV785) cells (FIG. 6A). The amount of CAR⁺ syngeneic (iRFP670) cells and allogeneic (GFP) cells out of the total CD3⁺ cells (%) was also measured in bone marrow, lymph node, liver and spleen (FIG. 6B). All tissue types showed a depletion of allogeneic CAR-T cells as compared to syngeneic (iRFP670) CAR-T cells.

### Example 5: Persistent Allogeneic CAR-T Cells in BLT Humanized Mice

[1115] To test whether allogeneic CAR-T cells could be engineered to increase persistence in BLT humanized in vivo, T cells were isolated from both syngeneic BLT humanized mice (iRFP670+ cells) and peripheral blood mononuclear cells (PBMCs) of an allogeneic de-identified human donor (GFP+). T cells were pan-stimulated and cultured for 3 days prior to transferring ≤10 million cells per donor source (i.e. BLT- and huPBMC-derived). Activated T cells from each donor source were base-edited using one or more guide RNAs specific to the TCRα chain (TRAC), Beta-2-Microglobulin (β2M), Class II, Major Histocompatibility Complex Transactivator (CIITA), Transporter Associated with Antigen Processing I (TAP1), and Transporter Associated with Antigen Processing II (TAP2) loci. T cells were then recovered in culture for a period of 4-6 hours. Base-edited T cells were cultured for an additional 5-6 days until infusion into recipient BLT mice. Minimum of 2 mice per condition. BLT mice were infused with a mixture (1:1 ratio) of syngeneic BLT-derived T cells and base-edited huPBMC-derived T cells. Mice were bled at day 1 and 7 post-infusion to evaluate ratio of infused cells by flow cytometry. Mice were then bled weekly thereafter until study end-point. Tissue samples were then cryopreserved for downstream analysis.

[1116] HLA deficient CAR-T cells overcame in vivo T cell-mediated allorejection. Expression of CD3, B2M, and HLA-DR in TRAC knock-out (KO) or TRAC, B2M, and CIITA triple knock-out (TKO) cells was measured using flow cytometry (see FIG. 35A) to confirm that the base editing of the genes was effective in reducing polypeptide expression. To evaluate the impact of the base edits on allorejection, BLT mice were then co-infused with a 1:1 ratio of TRAC-KO and TKO CAR-T cells (see FIG. 35B). Persistence of the TRAC-KO and TKO CAR-T cells post-infusion was measured over time using flow cytometry (FIG. 35C). CAR-T cells having a triple knock-out (TKO) of TRAC, B2M, and CIITA cells persisted for at least 14 days.

### Example 6: HLA Knock-Out CAR-T Cells Overcome Host T Cell-Mediated Allorejection

[1117] In order to test the mechanism of host T cell-mediated allorejection, HLA+ and HLA-knock-out CAR-T cells were infused in a 1:1 ratio into recipient mice (FIG. 7).

### Example 7: Human IL-15 Infusions Augment NK Cell Reconstitution in BLT Mice

[1118] IL-15 is a common γ-chain cytokine that affects T and NK cell homeostasis, proliferation and differentiation. NK cells in BLT mice poorly reconstitute due to lack of sufficient hIL-15 presentation, as well as minimal cross-reactivity with murine IL-15. In order to reconstitute NK cells in BLT mice, BLT mice were infused with 2.5 μg of rhIL-15 via intraperitoneal injection (IP) as depicted in FIG. 8A. NK cells were detected via CD56 expression in BLT mice one week after post-treatment with IL-15 (FIG. 8B) and were able to expand weeks post-treatment (FIG. 8C). Untreated mice were used as a control. These data demonstrate that IL-15 infusions were able to recapitulate NK cells in BLT mice for allorejection studies.

[1119] To determine how IL-15 primed NK cells responded to HLA null cells, allogeneic HLA⁺ and HLA⁻ knock-out CAR-T cells were infused in IL-15 infused BLT mice at day 15 as depicted in FIG. 8A. Human donor cells were used for comparison. Unstimulated and K562 cells were used as controls. NK cell functional activity was detected (FIG. 8D) and HLA expression was decreased (FIG. 8E) in BLT mice with IL-15 primed NK cells. The number of HLA⁻ knock-out CAR-T cells was also measured four (4) days post-infusion in BLT mice treated with IL-15 and in untreated mice (FIG. 8F). Overall, these data suggest that IL-15 primed NK cells in BLT mice were able to respond to and clear HLA null cells.

### Example 8: Knock-Out of CD58 Using Cas9, ABE8.20m, or rBE4

[1120] Knocking out CD58 in allogeneic cells is associated with improved immunogenic compatibility of the allogeneic cells. Therefore, gRNAs (CD58.1, CD58.2, and CD58.3 listed in Table 1B) were designed and evaluated for use in knocking out expression of CD58 in human primary T cells. The CD58 gene was edited in the cells using the methods described in Example 2. Successful knock-out of CD58 was detected using flow cytometry (see. FIG. 9). The guide RNAs were effective in combination with each of rBE4, ABE8.20m, and nuclease-active SpCas9 (Cas9) in effecting knock-out or reduced expression of CD58 in the cells.

### Example 9: Gene Modifications to Ablate HLA Class-I or Class II Surface Expression and Improve Evasion of Allorejection

[1121] Experiments were undertaken to ablate HLA class-I surface expression to overcome recognition of allogeneic immune cells by the recipient's T cells and/or NK cells. To do so, base editor systems (e.g., ABE8.20 and rBE mRNA600 in combination with gRNAs) and/or nuclease systems (e.g., Cas12b in combination with gRNAs) were designed to target 1) genes implicated in transcriptional activation of HLA class-I expression (CITA; NLRC5), 2) genes involved in proper assembly of mature HLA class-I molecules (e.g., TAP1, TAP2, ERp57 (PDIA3), and TAPBP (Tapasin)), and 3) CIITA involved in HLA class-II surface expression. Moreover, to enable HLA class-I deficient immune cells to evade recipient NK cell rejection, base editor and/or nuclease systems were designed to disrupt genes encoding proteins that bind NK cell activation receptors, including CD155, Nectin-2, CD48, MICA, MICB, and ULBP (see FIG. 19). Guide RNAs (see Table 1A) were designed for each gene to direct a CBE (rBE4 mRNA600), ABE (ABE8.20), and/or nuclease (Cas12b) to disrupt protein expression from the target genes (e.g., by altering the translational start site, by altering conserved splicing motifs, or by introducing premature stop codons).

[1122] The guide RNAs used included guide RNAs targeting multiple MICA, MICB, and/or ULBP alleles. The guide RNAs targeting multiple alleles of a target gene(s) were prepared based upon nucleotide sequence alignments of the sequences corresponding to multiple alleles of the target gene(s).

[1123] Guide RNAs were screened for use with ABE8.20 and rBE4 mRNA600 in primary human T cells 2 days post-activation by electroporation of the cells with mRNA encoding the appropriate editor and guide RNA. After 3 days, the cells were harvested and next-generation sequencing (NGS) was performed to determine editing efficiency of the target sequence at the genomic level (see FIGS. 10A-10G). In some instances, flow cytometry was performed to detect protein expression.

[1124] Base editing in T cells of TAP1 or TAPBP using gRNAs (see Table 1A) in combination with Cas12b or base editing of Tapasin, ERp571PDIA3, or CITA using gRNAs (see Table 1A) in combination with an ABE resulted in reduced expression of HLA-ABC, as measured by flow cytometry (see FIGS. 21A-21E). These results demonstrate that knock-out of peptide loading genes reduced HLA class-I surface expression.

[1125] Reduction in polypeptide expression through base editing of β2M, CITA, ERp57, TAPBP, TAP1, TAP2, and CIITA using gRNAs (see Table 1A) in combination with rBE4 or ABE8.20m was confirmed using flow cytometry (see FIGS. 33A and 33B).

[1126] An in vitro T cell Mixed Leukocyte Reaction (MLR) using target T cells (Mock Edit and β2M knock-out cells prepared using the methods and base editor systems (see Table 1A) provided herein) co-cultured with HLA mismatched effector cells was completed. The MLR demonstrated that knockout of β2M was associated with evasion of T cell-mediated allorejection in vitro (see FIGS. 33C and 33D).

### Example 10: HLA-E and HLA-G Single-Chain Trimers and Dimers

[1127] HLA-E and HLA-G constructs were designed for overexpression in immune cells to allow for the immune cells to evade NK cells. The HLA-E and HLA-G constructs were designed to be suitable for over-expression in the immune cells. The HLA-E and HLA-G constructs bind to the NKG2A inhibitory receptor of natural killer (NK) cells, thereby inhibiting the NK cells and preventing lysis of the immune cells thereby. The constructs were designed to allow immune cells expressing the constructs to resist allogeneic rejection mechanisms of a host subject.

[1128] The HLA-E and HLA-G constructs included secreted single-chain trimers (see Table 19 below), secreted single-chain dimers (see Table 19 below), and a membrane-bound single-chain HLA-E trimer (see sequence provided below). A schematic diagram of a representative secreted single-chain trimer is provided in FIG. 11 and schematic diagrams of the single-chain trimer and other constructs are provided in FIGS. 20A and 20B. The single-chain trimers contained a signal peptide, a loading peptide, Gly/Ser (GS) linkers, a β2M domain, and an HLA domain. The single-chain dimers were similar to the single-chain trimers in construction, but differed in that the single-chain dimers did not include any β2M domain.

TABLE 19
Secreted HLA-E and HLA-G constructs
Construct: BTx_CM118

| | |
|---|---|
| HLA-G5 | MVVMAPRTLFLLLSGALTLTETWAGSHS |
| isoform | MRYFSAAVSRPGRGEPRFIAMGYVDDTQ |
| | FVRFDSDSACPRMEPRAPWVEQEGPEYW |
| | EEETRNTKAHAQTDRMNLQTLRGYYNQS |
| | EASSHTLQWMIGCDLGSDGRLLRGYEQY |
| | AYDGKDYLALNEDLRSWTAADTAAQISK |
| | RKCEAANVAEQRRAYLEGTCVEWLHRYL |
| | ENGKEMLQRADPPKTHVTHHPVFDYEAT |
| | LRCWALGFYPAEIILTWQRDGEDQTQDV |
| | ELVETRPAGDGTFQKWAAVVVPSGEEQR |
| | YTCHVQHEGLPEPLMLRWSKEGDGGIMS |
| | VRESRSLSEDL |
| | (SEQ ID NO: 1012) |

Construct: BTx_CM119

| | |
|---|---|
| HLA-G5 + | MYRMQLLSCIALSLALVTNSGSHSMRYF |
| IL-2 | SAAVSRPGRGEPRFIAMGYVDDTQFVRF |
| signal | DSDSACPRMEPRAPWVEQEGPEYWEEET |
| peptide | RNTKAHAQTDRMNLQTLRGYYNQSEASS |
| | HTLQWMIGCDLGSDGRLLRGYEQYAYDG |
| | KDYLALNEDLRSWTAADTAAQISKRKCE |
| | AANVAEQRRAYLEGTCVEWLHRYLENGK |
| | EMLQRADPPKTHVTHHPVFDYEATLRCW |
| | ALGFYPAEIILTWQRDGEDQTQDVELVE |
| | TRPAGDGTFQKWAAVVVPSGEEQRYTCH |
| | VQHEGLPEPLMLRWSKEGDGGIMSVRES |
| | RSLSEDL |
| | (SEQ ID NO: 1013) |

Construct: BTx_CM120

| | |
|---|---|
| HLA-G5 | MYRMQLLSCIALSLALVTNSIQRTPKIQ |
| Single | VYSRHPAENGKSNFLNCYVSGFHPSDIE |
| chain | VDLLKNGERIEKVEHSDLSFSKDWSFYL |
| trimer + | LYYTEFTPTEKDEYACRVNHVTLSQPKI |
| IL-2 | VKWDRDMGGGGSGGGGSGGGGSRIIPRH |
| signal | LQLGGGGSGGGGSGGGGSGGGGSGSHSM |
| peptide | RYFSAAVSRPGRGEPRFIAMGYVDDTQF |
| | VRFDSDSACPRMEPRAPWVEQEGPEYWE |
| | EETRNTKAHAQTDRMNLQTLRGYYNQSE |
| | ASSHTLQWMIGCDLGSDGRLLRGYEQYA |
| | YDGKDYLALNEDLRSWTAADTAAQISKR |
| | KCEAANVAEQRRAYLEGTCVEWLHRYLE |
| | NGKEMLQRADPPKTHVTHHPVFDYEATL |
| | RCWALGFYPAEIILTWQRDGEDQTQDVE |
| | LVETRPAGDGTFQKWAAVVVPSGEEQRY |
| | TCHVQHEGLPEPLMLRWSKEGDGGIMSV |
| | RESRSLSEDL |
| | (SEQ ID NO: 1014) |

Construct: BTx_CM193

| | |
|---|---|
| HLA-E | MSRSVALAVLALLSLSGLEAVMAPRTLF |
| (ΔTM) | LGGGGSGGGGSGGGGSIQRTPKIQVYSR |
| Single | HPAENGKSNFLNCYVSGFHPSDIEVDLL |
| chain | KNGERIEKVEHSDLSFSKDWSFYLLYYT |
| trimer + | EFTPTEKDEYACRVNHVTLSQPKIVKWD |
| HLA-G5 | RDMGGGGSGGGGSGGGGSGGGGSGSHSL |
| intron | KYFHTSVSRPGRGEPRFISVGYVDDTQF |
| tail | VRFDNDAASPRMVPRAPWMEQEGSEYWD |
| | RETRSARDTAQIFRVNLRTLRGYYNQSE |
| | AGSHTLQWMHGCELGPDGRFLRGYEQFA |
| | YDGKDYLTLNEDLRSWTAVDTAAQISEQ |
| | KSNDASEAEHQRAYLEDTCVEWLHKYLE |
| | KGKETLLHLEPPKTHVTHHPISDHEATL |
| | RCWALGFYPAEITLTWQQDGEGHTQDTE |
| | LVETRPAGDGTFQKWAAVVVPSGEEQRY |
| | TCHVQHEGLPEPVTLRWSKEGDGGIMSV |
| | RESRSLSEDL |
| | (SEQ ID NO: 1015) |

Construct: BTx_CM211

| | |
|---|---|
| HLA-E | MSRSVALAVLALLSLSGLEAVMAPRTLF |
| (ΔTM) | LGGSGGGASGGGSHSLKYFHTSVSRPGR |
| β2M | GEPRFISVGYVDDTQFVRFDNDAASPRM |
| (C- | VPRAPWMEQEGSEYWDRETRSARDTAQI |
| term) | FRVNLRTLRGYYNQSEAGSHTLQWMHGC |
| Single | ELGPDGRFLRGYEQFAYDGKDYLTLNED |
| chain | LRSWTAVDTAAQISEQKSNDASEAEHQR |
| trimer | AYLEDTCVEWLHKYLEKGKETLLHLEPP |
| | KTHVTHHPISDHEATLRCWALGFYPAEI |
| | TLTWQQDGEGHTQDTELVETRPAGDGTF |
| | QKWAAVVVPSGEEQRYTCHVQHEGLPEP |
| | VTLRWGGGGSGGGGSGGGGSIQRTPKIQ |
| | VYSRHPAENGKSNFLNCYVSGFHPSDIE |
| | VDLLKNGERIEKVEHSDLSFSKDWSFYL |
| | LYYTEFTPTEKDEYACRVNHVTLSQPKI |
| | VKWDRDM |
| | (SEQ ID NO: 1016) |

Construct: BTx_CM212

| | |
|---|---|
| HLA-E | MSRSVALAVLALLSLSGLEAVMAPRTLF |
| (ΔTM) | LGGSGGGASGGGSHSLKYFHTSVSRPGR |
| Single | GEPRFISVGYVDDTQFVRFDNDAASPRM |
| chain | VPRAPWMEQEGSEYWDRETRSARDTAQI |
| dimer | FRVNLRTLRGYYNQSEAGSHTLQWMHGC |
| + | ELGPDGRFLRGYEQFAYDGKDYLTLNED |
| HLA-G5 | LRSWTAVDTAAQISEQKSNDASEAEHQR |
| intron | AYLEDTCVEWLHKYLEKGKETLLHLEPP |
| tail | KTHVTHHPISDHEATLRCWALGFYPAEI |
| | TLTWQQDGEGHTQDTELVETRPAGDGTF |
| | QKWAAVVVPSGEEQRYTCHVQHEGLPEP |
| | VTLRWSKEGDGGIMSVRESRSLSEDL |
| | (SEQ ID NO: 1017) |

Construct: BTx_CM213

| | |
|---|---|
| HLA-E | MSRSVALAVLALLSLSGLEAVMAPRTLF |
| (ΔTM) | LGGSGGGASGGGSHSLKYFHTSVSRPGR |
| Single | GEPRFISVGYVDDTQFVRFDNDAASPRM |
| chain | VPRAPWMEQEGSEYWDRETRSARDTAQI |
| dimer | FRVNLRTLRGYYNQSEAGSHTLQWMHGC |
| | ELGPDGRFLRGYEQFAYDGKDYLTLNED |
| | LRSWTAVDTAAQISEQKSNDASEAEHQR |
| | AYLEDTCVEWLHKYLEKGKETLLHLEPP |
| | KTHVTHHPISDHEATLRCWALGFYPAEI |
| | TLTWQQDGEGHTQDTELVETRPAGDGTF |
| | QKWAAVVVPSGEEQRYTCHVQHEGLPEP |
| | VTLRW |
| | (SEQ ID NO: 1018) |

In Table 19, the HLA domain is indicated by underlined text, linkers are indicated by bold text, signal peptides (e.g., the signal peptide of HLA-G, IL-2, or β2M) are indicated by italicized text, loading peptide are indicated by bold underlined text, an HLA-G5 intron tail is indicated by double-underlined text, and the β2M domain is indicated by bold, italic, underlined text.

[1129] Provided below is the sequence of the membrane-bound single-chain trimer that was designed (BTx_CM188):

(SEQ ID NO: 1019)
MSRSVALAVLALLSLSGLEAVMAPRTLFLGGGG
SGGGGSGGGGSIQRTPKIQVYSRHPAENGKSNF
LNCYVSGFHPSDIEVDLLKNGERIEKVEHSDLS
FSKDWSFYLLYYTEFTPTEKDEYACRVNHVTLS
QPKIVKWDRDMGGGGSGGGGSGGGGSGGGGSGS
HSLKYFHTSVSRPGRGEPRFISVGYVDDTQFVR
FDNDAASPRMVPRAPWMEQEGSEYWDRETRSAR
DTAQIFRVNLRTLRGYYNQSEAGSHTLQWMHGC
ELGPDGRFLRGYEQFAYDGKDYLTLNEDLRSWT
AVDTAAQISEQKSNDASEAEHQRAYLEDTCVEW
LHKYLEKGKETLLHLEPPKTHVTHHPISDHEAT
LRCWALGFYPAEITLTWQQDGEGHTQDTELVET
RPAGDGTFQKWAAVVVPSGEEQRYTCHVQHEGL
PEPVTLRWKPASQPTIPIMALIVLGGVAGLLLF
IGLGIFFCVRC.

[1130] In the above sequence, which corresponds to an HLA-E SCT (CD4TM) polypeptide, the HLA-E heavy chain domain is indicated by underlined text, linkers are indicated by bold text, the signal peptide is indicated by italicized text, the loading peptide (alternatively, “peptide for presentation”) is indicated by bold underlined text, the β2M domain is indicated by bold, italic, underlined text, the CD4 transmembrane domain is indicated by plain text, and the CD4 truncated intracellular domain is indicated by double-underlined text.

### Example 11: Detection of HLA-E Single-Chain Dimers and Trimers Secreted by CAR-T Cells

[1131] Secretion of the HLA-E single-chain dimer and trimer constructs (BTx_CM193, BTx_CM211, BTx_CM212, and BTx_CM213) was confirmed in anti-CD4 CAR-T cells (see FIG. 12). The anti-CD4 CAR-T cells were transduced with polynucleotides encoding each of the constructs. Expression of the constructs was under the control of the promoter elongation factor-1 alpha. The anti-CD4 CAR-T cells did not express a functional β2M polypeptide.

[1132] Secretion of the soluble HLA-E constructs was detected in culture supernatant using M-280 streptavidin Dynabeads conjugated to an anti-β2M antibody (αβ2M-coated beads). As a positive control, beads binding PE-labeled HLA-A2 tetramers were detected using flow cytometry (see FIG. 13). Cell-free supernatant gathered from the cells (UTD and cells expressing the constructs) was incubated with the M-280 streptavidin Dynabeads conjugated to an anti-β2M antibody and, as a negative control, M-280 streptavidin Dynabeads that were not conjugated to any antibody (uncoated beads). The incubated beads were then stained with anti-HLA-E antibody. As a further control, some incubated beads were not stained with the anti-HLA-E antibody (unstained beads). As shown in FIG. 12, all of the constructs were successfully secreted by the anti-CD4 CAR-T cells.

### Example 12: The HLA-E Single-Chain Trimer Constructs Protected Cells from Lysis by Natural Killer (NK) Cells

[1133] Experiments were undertaken to confirm that the expression of the HLA-E single-chain trimer constructs of Table 19 facilitated evasion of cell lysis by natural killer cells.

[1134] First, a mixed leukocyte reaction was prepared (see FIG. 18A) where natural killer cells were cultured in the presence of IL-2 and IL-15 for 1-3 days to yield primed NK cells. The primed NK cells were then mixed with off-target wild-type (WT; unedited) cells and either on-target β2M knock-out cells or on-target β2M knock-out T cells that also expressed the membrane-bound (“anchored”) HLA-E single-chain trimer (SCT) BTx_CM188 (see Example 10). The β2M gene was knocked out according to methods described herein using ABE8.20m and the guide RNA TSBTx760 (see Table 1A). Specific lysis was measured at 1 day, 2 days, and 3 days (FIG. 18B). Expression of the membrane-anchored HLA-E single-chain trimer conferred protection (from about 20% to about 30%) against in vitro NK cell mediated killing in vitro.

[1135] β2M knock-out CAR-T cells expressing the soluble HLA-E single-chain trimers (sHLA-SCTs) BTxCM193 and BTx_CM211 of Table 19 were exposed to natural killer cells. It was demonstrated that expression of the constructs was associated with inhibition of lysis of the CAR-T cells by the natural killer cells (FIGS. 14A and 14B). Therefore, secretion of the soluble HLA isoforms suppressed NK cells and reduced immunogenicity.

### Example 13: Evaluation of the Efficacy of the HLA-E and HLA-G Single-Chain Dimer and/or Trimer Constructs in the Context of BLT (Bone Marrow, Liver, and Thymus) Humanized Mice

[1136] Experiments are undertaken in vivo to confirm that the expression of the HLA-E and HLA-G single-chain dimer and trimer constructs of Table 19 or the single-chain membrane-bound trimer construct HLA-E SCT (CD4TM) (SEQ ID NO: 1019) facilitates evasion of cell lysis by natural killer cells in NS6 BLT (Bone marrow Liver+Thymus humanized) mice.

[1137] The NS6 BLT mice are injected with CAR-T cells expressing the constructs. At 24 hours and every 7 days, retro-orbital puncture is performed to obtain blood, which is then analyzed. Necrotyzed mice are also analyzed. The experiments demonstrate that expression of the constructs is associated with increased persistence of the CAR-T cells in the mice.

### Example 14: Evaluation of the Impact of Beta 2 Microglobulin (P2M) Knock-Out on T Cell and NK Cell Mediated Killing of Edited T Cells

[1138] Experiments were undertaken to determine the impact of β2M knock-out on T cell and NK cell mediated killing of edited cells.

[1139] First, a mixed leukocyte reaction was prepared (see FIG. 15A) where peripheral blood mononuclear cells (PBMCs) from a Donor #1 were cocultured with CD8+ cells from Donor 2 for from 6-8 days to prepare alloreactive CD8+ Donor #2 cells. The alloreactive CD8+ Donor #2 cells were then mixed with a 50:50 mixture of β2M knock-out T cells (off-target cells) and unedited cells (WT, on-target cells) at different ratios of effector to target cells (E:T). Cell lysis was measured by flow cytometry (see FIGS. 15B and 15C). The β2M gene was knocked out according to methods described herein using ABE8.20m and the guide RNA TSBTx760 (see Table 1A). β2M knock-out T cells were protected from T cell mediated killing (see FIGS. 15B and 15C).

[1140] Next, a mixed leukocyte reaction was prepared (see FIG. 16A) where natural killer cells were cultured in the presence of IL-2 and IL-15 for 2-3 days to yield primed NK cells. The primed NK cells were then mixed with a 50-50 mixture of the β2M knock-out T cells (on-target cells) and unedited cells (WT, off-target cells) at different ratios of effector to target cells (E:T). Cell lysis was measured by flow cytometry (see FIGS. 16B and 16C). β2M knock-out T cells showed increased susceptibility to in vitro NK cell-mediated killing (see FIGS. 16B-16D).

[1141] Finally, allorejection of the β2M knock-out T cells was evaluated in the BLT humanized mouse model. The BLT humanized mouse model recapitulates key features of allorejection, such as rejection of HLA mismatched T cells (see FIGS. 5A-5C and Example 7). The β2M knock-out T cells resisted allorejection by the BLT mice (FIG. 17), but were susceptible to rejection by NK cells in the BLT mice (see FIG. 8E and Example 7).

[1142] Therefore, β2M knock-out conferred protection against T cell allorejection, but increased susceptibility to NK cell lysis.

### Example 15: Screening of sgRNA Libraries to Identify sgRNAs Effective for Targeting a CBE for Base Editing B2M, TAP1, TAP2, TAPBP, or TAPBPL

[1143] Experiments were undertaken to screen libraries of guide RNA sequences to identify those that can be used effectively to target a CBE to base edit B2M, TAP1, TAP2, TAPBP, and/or TAPBPL to result in reduced levels of B2M/MHL I expression in T cells to improve allogeneic persistence in a subject. The design of the expression constructs used in the library are shown in FIG. 22. Libraries were prepared comprising about 2845 sgRNA sequences including 113 essential gene guides and 120 non-targeting guides. T cells expressing a CBE were transfected with the library of sgRNA sequences using lentiviral vectors. The transfected cells were then sorted to identify B2M− T cells (see FIGS. 23 and 24). Approximately 200M cells were sorted to yield a sorted population of about 400 k sorted cells.

[1144] Next generation sequencing (NGS) was used to identify sgRNA sequences enriched in the sorted population. A plot of input library sgRNA sequence counts vs. sorted cell sgRNA sequence counts is provided in FIG. 25 and shows those sgRNA sequences enriched for in the sorted cells and that, therefore, resulted in reduced levels of B2M in the cells. A Model-based Analysis of Genome-wide CRISPR/Cas9 Knockout (MAGeCK) analysis to obtain p-values for the enriched sgRNA sequences is provided in FIG. 26. The enriched guides and their associated p-values are listed below in Table 20

TABLE 20
Guide RNA′s (sequences are provided in Table 1A) identified in a screen for
guide RNA′s that, when introduced into a cell with a CBE, were associated with a
reduction in B2M expression in the cell. The guide b2m_825 was a guide previously
known to be effective for use in combination with a CBE to knock-out B2M expression
in a cell.

| sgRNA | Target | LFC | p-value < 0.05 |
|---|---|---|---|
| tap1_93 | Ex. 1 Stop | 7.4401 | 7.03E−40 |
| tapbp_53 | Ex.3 SD | 6.6267 | 1.35E−24 |
| tap2_5 | Ex.1 Stop | 7.2276 | 4.36E−24 |
| tap1_210 | Ex.2 Stop | 5.7332 | 7.95E−09 |
| tapbp_18 | Ex.2 Stop | 6.3208 | 1.13E−08 |
| tap2_4 | Ex.1 Stop | 6.5715 | 2.22E−08 |
| tapbp_5 | Ex.1 SA | 6.0282 | 1.14E−07 |
| tap1_498 | Ex.11 Stop | 5.8727 | 1.41E−07 |
| tap2_181 | Ex.4 Stop | 5.8155 | 3.06E−07 |
| b2m_825 | Ex. 1 SA | 6.4103 | 7.14E−07 |
| tap1_140 | Ex. 1 Stop | 5.2768 | 0.0001201 |
| tap1_202 | Ex.2 SD | 5.4565 | 0.00029346 |
| tapbp_64 | Ex.3 Stop | 5.5922 | 0.0017232 |
| tap1_485 | Ex.10 SD | 5.4537 | 0.002869 |
| tap1_142 | Ex. 1 Stop | 5.4298 | 0.0029897 |
| b2m_630 | D to N, V to I | 5.1592 | 0.002997 |
| tap2_325 | G to E, V to M | 4.4261 | 0.0035467 |
| tap1_139 | Ex.1 Stop | 5.6938 | 0.0039119 |
| tap1_38 | ? | 3.7956 | 0.0051346 |
| tapbp_79 | Ex.3 Stop | 5.3643 | 0.0058662 |
| b2m_227 | ? | 4.0202 | 0.0075654 |
| tapbp_80 | Ex.3 Stop | 5.1797 | 0.008526 |
| b2m_596 | Ex.3 SD | 4.9235 | 0.012183 |
| tap1_444 | Ex.9 Stop | 5.0023 | 0.013265 |
| tap1_161 | Ex.1 Stop | 5.3186 | 0.016731 |
| tap1_454 | Ex.9 SA | 5.1507 | 0.028677 |
| tap2_137 | Ex.2 SA | 5.2829 | 0.040738 |

### Example 16: Direct and Specific Knock-Out of HLA Class-I Genes in T Cells to Improve Allogeneic Persistence in a Subject

[1145] Experiments were undertaken to identify guide RNAs useful in base editing to directly and specifically knock-out HLA class-I gene expression in T cells to improve allogeneic persistence of the cells in a subject. Experiments were also undertaken to determine the contribution of HLA-A, -B, and -C genetic knock-out in T cells to elimination of the T cells by alloreactive T cells or NK cells.

[1146] First, to design guide RNA sequences, HLA class-I gene sequences were aligned (see, e.g., FIG. 27) to identify conserved regions that could be targeted by guide RNAs. A criterion for the design of the guide RNAs was that they must hit conserved sites for HLA-A, —B, and/or -C. Conserved sites were observed in many cases among all HLA class-I alleles (up to 12 target alleles). Over 8000 HLA class-I genes were described at the time the alignments were prepared. Guides designed to target the HLA class-I genes are provided in Table 1A. Guides were designed that are suitable for use with ABE, CBE, and/or Cas12b. The guides targeted a start site, a splice acceptor site, a splice donor site, or exon conserved regions.

[1147] To screen the guide RNAs for effectiveness, the designed guides were used to introduce base edits into the genomes of T cells collected from four independent donors according to the method described herein. The resulting expression of HLA-A, HLA-B, and HLA-C was measured in the edited T cells (see FIGS. 28A and 28B). FIG. 28B provides the genotypes for three out of the four donors. β2M knock-out reduced HLA-A, -B, and -C expression relative to unedited cells. The g850 guide (TSBTx4190) specifically knocked out HLA-A*20, which contains a 1 nt mismatch from other HLA-A alleles. The g860 guide (TSBTx4200) specifically knocked out HLA-B expression. The TSBTx4193 (g853) and TSBTx4194 (g854) guides overlapped+1 nt targeting SD exon 4 (α3 domain).

[1148] Synthetic guide RNAs TSBTx4190 (g850) and TSBTx4200 (g860) were designed to specifically disrupt HLA-A and HLA-B expression, respectively. Primary T cells from donor D270202 (see FIG. 28B) were base edited using TSBTx4190 and/or TSBTx4200 in combination with a ABE8.20m according to the methods described herein. Resulting HLA-A2, HLA-B, HLA-C, and pan HLA-E surface expression was measured using flow cytometry (see FIG. 29). As confirmed by flow cytometry, base editing using TSBTx4190 was associated with a specific reduction in HLA-A2 expression and base editing using TSBTx4200 was associated with a specific reduction in HLA-Bw6 expression. Base editing carried out using the guides TSBTx4190 and TSBTx4200 was not associated with a reduction in pan HLA-E expression.

[1149] The targeted HLA class-I knock-outs mitigated T cell allorejection (see FIGS. 30A and 30B). An in vitro mixed leukocyte reaction was carried out according to methods described herein to evaluate specific killing of CFSE-labeled on-target cells including unedited (HLA+), HLA-A knock-out (TSBTx4190), and HLA-B knock-out (TSBTx4200) T cells relative to CTFR-labeled off-target β2M knock-out T cells by HA class-I mismatched effector T cells. Cell lysis was evaluated 48 hours post-coculture. As can be seen from FIGS. 30A and 30B, base editing using ABE8.20m in combination with TSBTx4190 and/or TSBTx4200 resulted in reduced killing by the mismatched effector T cells.

[1150] Targeted knock-out of HLA-B using g860 (TSBTx4200) in combination with ABE8.20m was associated with protection against NK cell lysis (see FIGS. 31A and 31B). An in vitro mixed leukocyte reaction was carried out according to methods described herein to evaluate specific killing of CTFR-labeled on-target cells including β2M knock-out, HLA-A knock-out (TSBTx4190), and HLA-B knock-out (TSBTx4200) T cells relative to CFSE-labeled off-target unedited (HLA+) T cells. Cell lysis was measured 48 hours post-culture. The plots of FIGS. 31A and 31B demonstrate that HLA-B was dispensable for protection against NK cell lysis.

[1151] An experiment was undertaken to determine whether specific HLA-ABC knock-out prevented T cell-mediated allorejection in vivo. BLT mice were co-infused with an equal mixture of unedited (HLA+), β2M knock-out, and HLA-ABC knock-out T cells. The TRAC and CIITA genes of all T cells were also knocked out using base editing. Base editing of all genes was carried out using ABE8.20m according to the methods described herein and using guides listed in Table 1A. HLA-ABC knock-out T cells were additionally multiplex edited with the following guide RNAs: TSBTx4190, which targets HLA-A, TSBTx4201, which targets HLA-B, and TSBTx4208, which targets HLA-C (see Table 1A). Table 21 provides an overview of how the cells were modified. The graph of FIG. 32 (see also Table 21) shows peripheral blood concentration of each T cell population over time post-infusion. HLA+ T cells were susceptible to allorejection but the β2M knock-out and HLA-ABC knock-out cells were resistant to allorejection.

TABLE 21
Modifications made to the cells used to prepare FIG. 32. RQR8
was used as a surface receptor tag to identify T cells.

| | | Edits | | | |
|---|---|---|---|---|---|
| | T cell Tag | TCR | HLA-II | HLA-I | Target |
| equal | RQR8 | CD3e | CIITA | — | ON |
| mix | RQR8 | CD3e | CIITA | b2M | OFF |
| | GFP | CD3e | CIITA | ABC | OFF |

[1152] These results demonstrate that base editing could be leveraged to knock-out HLA-A, HLA-B, and HLA-C directly across multiple HLA mismatched donors. Knockout of these genes had a differential impact on T cell and NK cell mediated allorejection.

### Example 22: Base-Edited Allogeneic T Cells Expressing HLA-C+ but Deficient in Expression of HLA-A and HLA-B were Resistant to Rejection

[1153] Experiments were undertaken to prepare modified allogeneic immune cells resistant to elimination by a host's natural killer cells and/or T cells.

[1154] First, in vitro experiments were undertaken to demonstrate that cell populations deficient in expression of HLA-A, HLA-B, and/or HLA-C were resistant to killing by natural killer cells or T cells in mixed leukocyte reactions. T cell populations were edited using the base editor ABE8.20m in combination with a guide RNA targeting beta-2-microglobulin (see sequences listed in Tables 1A and SEQ ID NOs: 2448, 2450, 2454, and 2622-2625) or with one of the pan HLA class-I guide RNAs TSBTx4193 and TSBTx4194 (see sequences listed in Tables TA and 1C). The base edited T cell populations were then evaluated using an NK cell mixed leukocyte reaction. The Effector (“E”) cells (natural killer (NK) cells) and Target (“T”) cells (base-edited cells) were cultured for 48 hours and specific lysis was then assessed using flow cytometry. T cells edited with the pan HLA class-I guide RNAs were protected from NK cell lysis in vitro, while beta-2-microglobulin knock-out cells were susceptible to lysis, as shown in FIG. 37.

[1155] The base edited T cell populations were also evaluated using a T cell mixed leukocyte reaction. Primary human T cells were co-cultured with either unedited HLA class-I mismatched T cells or the edited T cell populations. The effector cells (mismatched T cells) and target cells (base-edited cells) were cultured for 48 hours and specific lysis was then assessed using flow cytometry. The T cell populations edited with the pan HLA class-I guide RNAs showed increased protection from T cell lysis in vitro relative to unedited HLA+ mismatched T cells, as shown in FIG. 38.

[1156] Having determined that T cell populations base edited using the base editor ABE8.20m in combination with the guide RNA TSBTx4193 were resistant to lysis in vitro by natural killer (NK) or mismatched T cells, an experiment was undertaken to determine the immunophenotypes of cells in the edited T cell populations. Surface-expression of HLA-A, HLA-B, and HLA-C on the cells was measured by staining the cells using antibodies against HLA-A2, HLA-Bw6, and HLA-C, respectively, followed by flow cytometry. The immunophenotype HLA-A2- (i.e., no surface-expression of HLA-A2), HLA-Bw6- (i.e., no surface expression of HLA-Bw6), and HLA-C+(i.e., positive for surface expression of HLA-C) was the dominant immunophenotype in the base edited T cell population, as shown in FIG. 39.

[1157] Experiments were next undertaken to evaluate the persistence of the base-edited allogeneic T cells in vivo. IL-15 primed BLT mice were infused with the base-edited allogeneic T cell populations and the number of allogeneic T cells having the immunophenotype HLA-ABC+(i.e., HLA-A+, HLA-B+, and HLA-C+), HLA-C+(i.e., HLA-A-, HLA-B-, and HLA-C+), or HLA-ABC− (i.e., HLA-A-, HLA-B-, and HLA-C-) was counted using flow cytometry at days 1, 7, and 14 post-infusion (see FIGS. 40 and 41). As determined through measurements taken at day 7 post-infusion (FIG. 40), HLA-ABC negative or HLA class-I deficient allogeneic T cells were susceptible to NK cell-mediated rejection in vivo, while allogeneic T cells expressing HLA-ABC+ or expressing only HLA-C and not HLA-A or HLA-B were relatively resistant to NK cell-mediated rejection in vivo. As determined through measurements taken at day 14 post-infusion (FIG. 41), HLA-ABC+ allogeneic T cells were less resistant to T cell-mediated rejection in vivo than T cells expressing HLA-C and not HLA-A or HLA-B.

[1158] Therefore, immune cells base edited to be deficient in expression of HLA-A and HLA-B while maintaining expression of HLA-C showed improved resistance to both NK- and T cell-mediated rejection in vivo relative to both unedited cells and cells deficient in expression of all of HLA-A, HLA-B, and HLA-C.

### Example 23: Base Editing Using Guides Targeting Beta-2-Microglobulin (B2M) or a Single Component of the Peptide Loading Complex Resulted in Downregulated B2M Surface-Expression but not of HLA Class-I Polypeptides

[1159] Experiments were undertaken to evaluate the impact of base editing using guide RNAs targeting a component of the peptide loading complex (i.e., TAP2, TAP1, TAPBP, FIG. 42A), or B2M on surface-expression of B2M and HLA-A, -B, and -C (FIGS. 42B and 42C). Guides 47-68 were evaluated in combination with a base editor to edit T cells, where guide 47 corresponded to Tap2_5, which targets TAP2; guide 48 corresponded to Tap1_93, which targets TAP1; guide 49 corresponded to Tap2_4, which targets TAP2; guide 50 corresponded to Tap1_139, which targets TAP1; guide 51 corresponded to Tapbp_18, which targets TAPBP; guide 52 corresponded to Tap2_137, which targets TAP2; guide 53 corresponded to Tapbp_64, which targets TAPBP; guide 54 corresponded to Tap1_161, which targets TAP1; guide 55 corresponded to Tap1_454, which targets TAP1; guide 56 corresponded to Tap1_485, which targets TAP1; guide 57 corresponded to Tapbp_5, which targets TAPBP; guide 58 corresponded to b2m_629, which targets B2M; guide 59 corresponded to b2m_630, which targets B2M; guide 60 corresponded to b2m_315, which targets B2M; and guide 61 corresponded to b2m_316, which targets B2M (see Table 1A for guide sequences). A B2M guide RNA known to be effective for use in knocking out B2M expression was used as a positive control and corresponded to TSBTx845 (see Table 1A).

[1160] It was found that base editing using some guides targeting a polynucleotide encoding a single component of the peptide loading complex or B2M resulted in reduced surface-expression of B2M but had little-to-no influence on surface-expression of HLA-A, -B, and -C.

### Example 24: Multiplex Editing Tuned HLA Class-I Polypeptide Surface-Expression

[1161] Having determined that editing of a single polynucleotide was sometimes not effective in downregulating surface-expression of HLA Class-I polypeptides (i.e., HLA-A, -B, and -C) in base-edited T cells, experiments were next undertaken to determine if multiplex editing would result in reduced HLA Class-I polypeptide expression. Combinations of 47-68 (see FIGS. 43A-43C) were evaluated in combination with a base editor to edit T cells, where guide 47 corresponded to Tap2_5, which targets TAP2; guide 48 corresponded to Tap1_93, which targets TAP1; guide 49 corresponded to Tap2_4, which targets TAP2; guide 50 corresponded to Tap1_139, which targets TAP1; guide 51 corresponded to Tapbp_18, which targets TAPBP; guide 52 corresponded to Tap2_137, which targets TAP2; guide 53 corresponded to Tapbp_64, which targets TAPBP; guide 54 corresponded to Tap1_161, which targets TAP1; guide 55 corresponded to Tap1_454, which targets TAP1; guide 56 corresponded to Tap1_485, which targets TAP1; guide 57 corresponded to Tapbp_5, which targets TAPBP; guide 58 corresponded to b2m_629, which targets B2M; guide 59 corresponded to b2m_630, which targets B2M; guide 60 corresponded to b2m_315, which targets B2M; and guide 61 corresponded to b2m_316, which targets B2M (see Table 1A for guide sequences). A B2M guide RNA known to be effective for use in knocking out B2M expression was used as a positive control and corresponded to TSBTx845 (see Table 1A).

[1162] It was found that multiplex editing could be used to effectively tune surface-expression of HLA class-I polypeptides (i.e., HLA-A, -B, and -C). In particular, it was found that the combination of guide 56 targeting TAP1 and guide 57 targeting tapasin effected a reduction in surface-expression of the HLA class-I polypeptides (FIGS. 43A-43C). Therefore, it was found that base editing of polynucleotides encoding multiple components of the peptide loading complex had a tuning effect by reducing but not eliminating surface-expression of the HLA class-I polypeptides.

### Example 25: Sequence Alignments Indicated that Base Editing could be Used to Preferentially Knock-Out HLA-A and HLA-B Alleles while not Knocking-Out HLA-C Expression

[1163] Experiments were undertaken to evaluate, in silico, the capacity for guide RNAs TSBTx4193 and TSBTx4194 to target alleles encoding HLA class-I polypeptides. As shown in FIG. 44A, it was determined that over 99% of 989 HLA-A alleles evaluated and 98% of 992 HLA-B alleles evaluated could be targeted using the guides, while only 60% of 1000 HLA-C alleles evaluated could be targeted. Therefore, it was determined that cells expressing HLA-C and with HLA-A and HLA-B expression knocked out could be prepared by base-editing using the guide RNA TSBTx4193 and/or TSBTx4194 followed by cell sorting (e.g., using flow cytometry) to select for those cells surface-expressing HLA-C and not surface-expressing HLA-A or HLA-B.

[1164] It was determined through use of multiple sequence alignments (see FIG. 44B) that some HLA-C alleles (see, e.g., HLA-C*02:02:02:01) could be effectively targeted using TSBTx4193 or TSBTx4194 while other HLA-C alleles (e.g., HLA-C*17:01:01:02) could not on account of mutations, such as a mutation within the PAM sequence recognized by a base editor used in combination with the guides. Thus, careful selection of a donor could be used to obtain cells that, when base edited with TSBTx4193 or TSBTx4194, do not express HLA-A or HLA-B, but do express HLA-C.

### OTHER EMBODIMENTS

[1165] From the foregoing description, it will be apparent that variations and modifications may be made to the invention described herein to adopt it to various usages and conditions. Such embodiments are also within the scope of the following claims.

[1166] The recitation of a listing of elements in any definition of a variable herein includes definitions of that variable as any single element or combination (or subcombination) of listed elements. The recitation of an embodiment herein includes that embodiment as any single embodiment or in combination with any other embodiments or portions thereof.

[1167] All patents and publications mentioned in this specification are herein incorporated by reference to the same extent as if each independent patent and publication was specifically and individually indicated to be incorporated by reference.

What is claimed is:

1. A method for producing a persistent allogeneic modified immune cell, the method comprising contacting a cell with a base editor comprising a polynucleotide programmable DNA binding polypeptide (napDNAbp), a deaminase, and one or more guide RNAs (gRNAs) that target the base editor to effect an alteration in a nucleic acid molecule, wherein the nucleic acid molecule encodes a polypeptide and/or comprises a regulatory element associated with expression thereof, and wherein the polypeptide is selected from the group consisting of HLA-A, HLA-B, HLA-C, Transporter Associated with Antigen Processing I (TAP1), Transporter Associated with Antigen Processing II (TAP2), Tapasin/TAP Binding Protein (TAPBP), TAP-Binding Protein-Like (TAPBPL), NLR family CARD domain containing 5 (NLRC5)/MHC class I transactivator (CITA), cluster of differentiation 155 (CD155), MHC class I polypeptide-related sequence A (MICA), MHC class I polypeptide-related sequence B (MICB) polypeptide, nectin cell adhesion molecule 2 (Nectin-2), and UL16 binding protein 1-6 (ULBP), thereby producing the persistent allogeneic modified immune cell.

2. The method of claim 1, wherein the method further comprises contacting the cell with one or more guide RNAs that target the base editor to effect an alteration in a nucleic acid molecule, wherein the nucleic acid molecule encodes a polypeptide and/or comprises a regulatory element associated with expression thereof, and wherein the polypeptide is selected from the group consisting of beta-2 microglobulin, CD48, CD58, Protein Disulfide Isomerase Family A Member 3 (PDIA3/ERp57), and T Cell Receptor Alpha Constant polypeptides.

3. The method of claim 1, wherein the method comprises effecting a nucleobase alteration that reduces expression on the cell of a polypeptide selected from the group consisting of HLA-A, HLA-B, and HLA-C.

4. The method of claim 1, wherein the one or more gRNAs comprise a nucleotide sequence with at least about 85% sequence identity to GCACUCACCCGCCCAGGUCU (SEQ ID NO: 817; TSBTx4190), GACCCGCAUCUCGGCGUCUG (SEQ ID NO: 827; TSBTx4200), CCUUACCCCAUCUCAGGGUG (SEQ ID NO: 820; TSBTx4193), and/or CUUACCCCAUCUCAGGGUGA (SEQ ID NO: 821; TSBTx4194).

5. The method of claim 1, further comprising overexpressing in the cell an inhibitory receptor, or fragment thereof, selected from the group consisting of Human Leukocyte Antigen-E (HLA-E), Human Leukocyte Antigen-G (HLA-G), Programmed Death Ligand 1 (PD-L1), and Cluster of Differentiation 47 (CD47).

6. A method for producing a persistent allogeneic modified immune cell, the method comprising:
(a) contacting a cell with a base editor comprising a polynucleotide programmable DNA binding polypeptide (napDNAbp), a deaminase, and one or more guide RNAs (gRNAs) that target a nucleic acid molecule, wherein the nucleic acid molecule encodes a polypeptide or comprises a regulatory element associated with expression of the polypeptide, and wherein the polypeptide is selected from the group consisting of HLA-A, HLA-B, HLA-C, Transporter Associated with Antigen Processing I (TAP1), Transporter Associated with Antigen Processing II (TAP2), Tapasin/TAP Binding Protein (TAPBP), TAP-Binding Protein-Like (TAPBPL), NLR family CARD domain containing 5 (NLRC5)/MHC class I transactivator (CITA), cluster of differentiation 155 (CD155), MHC class I polypeptide-related sequence A (MICA), MHC class I polypeptide-related sequence B (MICB) polypeptide, nectin cell adhesion molecule 2 (Nectin-2), and UL16 binding protein 1-6 (ULBP); and
(b) overexpressing in the cell an inhibitory receptor, or fragment thereof, selected from the group consisting of Human Leukocyte Antigen-E (HLA-E), Human Leukocyte Antigen-G (HLA-G), Programmed Death Ligand 1 (PD-L1), and Cluster of Differentiation 47 (CD47).

7. An allogeneic modified immune cell produced according to the method of claim 1.

8. An allogeneic modified immune cell comprising a nucleobase alteration that reduces or eliminates expression of a polypeptide selected from the group consisting of HLA-A, HLA-B, HLA-C, Transporter Associated with Antigen Processing I (TAP1), Transporter Associated with Antigen Processing II (TAP2), Tapasin/TAP Binding Protein (TAPBP), TAP-Binding Protein-Like (TAPBPL), NLR family CARD domain containing 5 (NLRC5)/MHC class I transactivator (CITA), cluster of differentiation 155 (CD155), MHC class I polypeptide-related sequence A (MICA), MHC class I polypeptide-related sequence B (MICB) polypeptide, nectin cell adhesion molecule 2 (Nectin-2), and UL16 binding protein 1-6 (ULBP).

9. A pharmaceutical composition comprising an effective amount an allogeneic modified immune cell of claim 8.

10. A composition comprising a guide RNA (gRNA) and a polynucleotide encoding a base editor comprising a polynucleotide programmable DNA binding polypeptide (napDNAbp) domain and a deaminase domain, wherein the gRNA comprises a nucleic acid sequence that is complementary to a polynucleotide, wherein the polynucleotide encodes a polypeptide or comprises a regulatory element associated with expression of the polypeptide, wherein the polypeptide is selected from the group consisting of HLA-A, HLA-B, HLA-C, Transporter Associated with Antigen Processing I (TAP1), Transporter Associated with Antigen Processing II (TAP2), Tapasin/TAP Binding Protein (TAPBP), TAP-Binding Protein-Like (TAPBPL), NLR family CARD domain containing 5 (NLRC5)/MHC class I transactivator (CITA), cluster of differentiation 155 (CD155), MHC class I polypeptide-related sequence A (MICA), MHC class I polypeptide-related sequence B (MICB) polypeptide, nectin cell adhesion molecule 2 (Nectin-2), and UL16 binding protein 1-6 (ULBP).

11. The composition of claim 10, wherein the guide RNA comprises a nucleotide sequence selected from the group consisting of GCACUCACCCGCCCAGGUCU (SEQ ID NO: 817; TSBTx4190), GACCCGCAUCUCGGCGUCUG (SEQ ID NO: 827; TSBTx4200), CCUUACCCCAUCUCAGGGUG (SEQ ID NO: 820; TSBTx4193), and CUUACCCCAUCUCAGGGUGA (SEQ ID NO: 821; TSBTx4194).

12. A kit comprising an allogeneic modified immune cell of claim 8.

13. A method of treating cancer in a subject, the method comprising administering to the subject an effective amount of an allogeneic modified immune cell of claim 8.

14. A fusion polypeptide comprising a loading peptide, at least a fragment of an HLA-G polypeptide, and at least a fragment of a β2M polypeptide.

15. The fusion polypeptide of claim 14, wherein the recombinant polypeptide comprises from N-terminus to C-terminus:
a) a loading peptide, at least a fragment of an HLA-G polypeptide, and at least a fragment of a β2M polypeptide;
b) at least a fragment of a β2M polypeptide, a loading peptide, and at least a fragment of an HLA-G polypeptide;
c) a loading peptide, at least a fragment of a β2M polypeptide, and at least a fragment of an HLA-G polypeptide; or
d) fragment of an HLA-G polypeptide, a loading peptide, and at least at least a fragment of a β2M polypeptide.

16. A fusion polypeptide comprising a loading peptide, at least a fragment of an HLA-E polypeptide, and at least a fragment of a β2M polypeptide.

17. A fusion polypeptide comprising a loading peptide, and at least a fragment of an HLA-E polypeptide.

18. A fusion polypeptide comprising an amino acid sequence with at least 85% sequence identity to a sequence selected from the group consisting of:
HLA-G5 + IL-2 signal peptide
(SEQ ID NO: 1013)
MYRMQLLSCIALSLALVTNSGSHSMRYFSAAVSRPGRGEPRFIAMGYVDD
TQFVRFDSDSACPRMEPRAPWVEQEGPEYWEEETRNTKAHAQTDRMNLQT
LRGYYNQSEASSHTLQWMIGCDLGSDGRLLRGYEQYAYDGKDYLALNEDL
RSWTAADTAAQISKRKCEAANVAEQRRAYLEGTCVEWLHRYLENGKEMLQ
RADPPKTHVTHHPVFDYEATLRCWALGFYPAEIILTWQRDGEDQTQDVEL
VETRPAGDGTFQKWAAVVVPSGEEQRYTCHVQHEGLPEPLMLRWSKEGDG
GIMSVRESRSLSEDL;
HLA-G5 Single chain trimer + IL-2 signal peptide
(SEQ ID NO: 1014)
MYRMQLLSCIALSLALVTNSIQRTPKIQVYSRHPAENGKSNFLNCYVSGF
HPSDIEVDLLKNGERIEKVEHSDLSFSKDWSFYLLYYTEFTPTEKDEYAC
RVNHVTLSQPKIVKWDRDMGGGGSGGGGSGGGGSRIIPRHLQLGGGGSGG
GGSGGGGSGGGGSGSHSMRYFSAAVSRPGRGEPRFIAMGYVDDTQFVRFD
SDSACPRMEPRAPWVEQEGPEYWEEETRNTKAHAQTDRMNLQTLRGYYNQ
SEASSHTLQWMIGCDLGSDGRLLRGYEQYAYDGKDYLALNEDLRSWTAAD
TAAQISKRKCEAANVAEQRRAYLEGTCVEWLHRYLENGKEMLQRADPPKT
HVTHHPVFDYEATLRCWALGFYPAEIILTWQRDGEDQTQDVELVETRPAG
DGTFQKWAAVVVPSGEEQRYTCHVQHEGLPEPLMLRWSKEGDGGIMSVRE
SRSLSEDL;
HLA-E(ΔTM) Single chain trimer + HLA-G5 intron
tail
(SEQ ID NO: 1015)
MSRSVALAVLALLSLSGLEAVMAPRTLFLGGGGSGGGGSGGGGSIQRTPK
IQVYSRHPAENGKSNFLNCYVSGFHPSDIEVDLLKNGERIEKVEHSDLSF
SKDWSFYLLYYTEFTPTEKDEYACRVNHVTLSQPKIVKWDRDMGGGGSGG
GGSGGGGSGGGGSGSHSLKYFHTSVSRPGRGEPRFISVGYVDDTQFVRFD
NDAASPRMVPRAPWMEQEGSEYWDRETRSARDTAQIFRVNLRTLRGYYNQ
SEAGSHTLQWMHGCELGPDGRFLRGYEQFAYDGKDYLTLNEDLRSWTAVD
TAAQISEQKSNDASEAEHQRAYLEDTCVEWLHKYLEKGKETLLHLEPPKT
HVTHHPISDHEATLRCWALGFYPAEITLTWQQDGEGHTQDTELVETRPAG
DGTFQKWAAVVVPSGEEQRYTCHVQHEGLPEPVTLRWSKEGDGGIMSVRE
SRSLSEDL;
HLA-E(ΔTM) β2M (C-term) Single chain trimer
(SEQ ID NO: 1016)
MSRSVALAVLALLSLSGLEAVMAPRTLFLGGSGGGASGGGSHSLKYFHTS
VSRPGRGEPRFISVGYVDDTQFVRFDNDAASPRMVPRAPWMEQEGSEYWD
RETRSARDTAQIFRVNLRTLRGYYNQSEAGSHTLQWMHGCELGPDGRFLR
GYEQFAYDGKDYLTLNEDLRSWTAVDTAAQISEQKSNDASEAEHQRAYLE
DTCVEWLHKYLEKGKETLLHLEPPKTHVTHHPISDHEATLRCWALGFYPA
EITLTWQQDGEGHTQDTELVETRPAGDGTFQKWAAVVVPSGEEQRYTCHV
QHEGLPEPVTLRWGGGGSGGGGSGGGGSIQRTPKIQVYSRHPAENGKSNF
LNCYVSGFHPSDIEVDLLKNGERIEKVEHSDLSFSKDWSFYLLYYTEFTP
TEKDEYACRVNHVTLSQPKIVKWDRDM;
HLA-E(ΔTM) Single chain dimer + HLA-G5 intron
tail
(SEQ ID NO: 1017)
MSRSVALAVLALLSLSGLEAVMAPRTLFLGGSGGGASGGGSHSLKYFHTS
VSRPGRGEPRFISVGYVDDTQFVRFDNDAASPRMVPRAPWMEQEGSEYWD
RETRSARDTAQIFRVNLRTLRGYYNQSEAGSHTLQWMHGCELGPDGRFLR
GYEQFAYDGKDYLTLNEDLRSWTAVDTAAQISEQKSNDASEAEHQRAYLE
DTCVEWLHKYLEKGKETLLHLEPPKTHVTHHPISDHEATLRCWALGFYPA
EITLTWQQDGEGHTQDTELVETRPAGDGTFQKWAAVVVPSGEEQRYTCHV
QHEGLPEPVTLRWSKEGDGGIMSVRESRSLSEDL;
and
HLA-E(ΔTM) Single chain dimer
(SEQ ID NO: 1018)
MSRSVALAVLALLSLSGLEAVMAPRTLFLGGSGGGASGGGSHSLKYFHTS
VSRPGRGEPRFISVGYVDDTQFVRFDNDAASPRMVPRAPWMEQEGSEYWD
RETRSARDTAQIFRVNLRTLRGYYNQSEAGSHTLQWMHGCELGPDGRFLR
GYEQFAYDGKDYLTLNEDLRSWTAVDTAAQISEQKSNDASEAEHQRAYLE
DTCVEWLHKYLEKGKETLLHLEPPKTHVTHHPISDHEATLRCWALGFYPA
EITLTWQQDGEGHTQDTELVETRPAGDGTFQKWAAVVVPSGEEQRYTCHV
QHEGLPEPVTLRW.

19. A membrane-bound fusion polypeptide, wherein the fusion polypeptide comprises a β2M domain, and an HLA-E domain and/or a transmembrane domain.

20. A fusion polypeptide comprising an amino acid sequence having at least 85% sequence identity to the following sequence:
(SEQ ID NO: 1019)
MSRSVALAVLALLSLSGLEAVMAPRTLFLGGGGSGGGGSGGGGSIQRTPK
IQVYSRHPAENGKSNFLNCYVSGFHPSDIEVDLLKNGERIEKVEHSDLSF
SKDWSFYLLYYTEFTPTEKDEYACRVNHVTLSQPKIVKWDRDMGGGGSGG
GGSGGGGSGGGGSGSHSLKYFHTSVSRPGRGEPRFISVGYVDDTQFVRFD
NDAASPRMVPRAPWMEQEGSEYWDRETRSARDTAQIFRVNLRTLRGYYNQ
SEAGSHTLQWMHGCELGPDGRFLRGYEQFAYDGKDYLTLNEDLRSWTAVD
TAAQISEQKSNDASEAEHQRAYLEDTCVEWLHKYLEKGKETLLHLEPPKT
HVTHHPISDHEATLRCWALGFYPAEITLTWQQDGEGHTQDTELVETRPAG
DGTFQKWAAVVVPSGEEQRYTCHVQHEGLPEPVTLRWKPASQPTIPIMAL
IVLGGVAGLLLFIGLGIFFCVRC.

21. A mammalian expression vector comprising a polynucleotide sequence encoding the fusion polypeptide of claim 14.

22. An allogeneic modified immune cell comprising the vector of claim 21.

23. A method for producing a persistent allogeneic modified immune cell, the method comprising contacting a cell with a polynucleotide programmable DNA binding polypeptide (napDNAbp) and one or more guide RNAs (gRNAs) that target the napDNAbp to cleave a target nucleic acid molecule and introduce an alteration in the target nucleic acid molecule, wherein the target nucleic acid molecule encodes a polypeptide and/or comprises a regulatory element associated with expression thereof, and wherein the polypeptide is selected from the group consisting of HLA-A, HLA-B, HLA-C, Transporter Associated with Antigen Processing I (TAP1), Transporter Associated with Antigen Processing II (TAP2), Tapasin/TAP Binding Protein (TAPBP), TAP-Binding Protein-Like (TAPBPL), NLR family CARD domain containing 5 (NLRC5)/MHC class I transactivator (CITA), cluster of differentiation 155 (CD155), MHC class I polypeptide-related sequence A (MICA), MHC class I polypeptide-related sequence B (MICB) polypeptide, nectin cell adhesion molecule 2 (Nectin-2), and UL16 binding protein 1-6 (ULBP), thereby producing the persistent allogeneic modified immune cell.

24. A method for producing a persistent allogeneic modified immune cell, the method comprising contacting a cell with a base editor comprising a polynucleotide programmable DNA binding polypeptide (napDNAbp), a deaminase, and guide RNAs (gRNAs) that target the base editor to effect an alteration in one or more nucleic acid molecules, wherein the one or more nucleic acid molecules encode the following polypeptides and/or comprise regulatory elements associated with expression thereof: CD5, B2M, CD3 gamma, CD3 epsilon, CIITA, and PD-1 (PD1), thereby producing the persistent allogeneic modified immune cell; or contacting a cell with a base editor comprising a polynucleotide programmable DNA binding polypeptide (napDNAbp), a deaminase, and guide RNAs (gRNAs) that target the base editor to effect an alteration in one or more nucleic acid molecules, wherein the one or more nucleic acid molecules encode the following polypeptides and/or comprise regulatory elements associated with expression thereof: HLA-A, HLA-B, and CIITA, thereby producing the persistent allogeneic modified immune cell, wherein the persistent allogeneic modified immune cell surface-expresses HLA-C.

25. An allogeneic modified immune cell produced by the method of claim 24.

26. A method of treating cancer in a subject, the method comprising administering to the subject an effective amount of the allogeneic modified immune cell of claim 25.

The application's sequence listing, which the Patent Office published only in electronic form, follows.

SEQUENCE LISTING (2911 sequences)

SEQ ID NO: 1 - protein, 167 aa, Escherichia coli
  REGION 1..167: note = misc_feature - TadA*7.10 (ecTadA) polypeptide sequence
MSEVEFSHEYWMRHALTLAKRARDEREVPVGAVLVLNNRVIGEGWNRAIGLHDPTAHAEIMALRQGGLVMQNYRLIDATLYVTFEPCVMCAGAMIHSRIGRVVFGVRNAKTGAAGSLMDVLHYPGMNHRVEITEGILADECAALLCYFFRMPRQVFNAQKKAQSSTD

SEQ ID NO: 2 - DNA, 4092 bp, synthetic construct
  misc_feature 1..4092: note = BhCas12b GGSGGS-ABE8-Xten20at P153 polynucleotide sequence
  misc_feature 1..6: note = Kozak sequence
  misc_feature 7..57: note = Sequence encoding N-terminal nuclear localization signal
  misc_feature 58..513: note = Sequence encoding BhCas12b
  misc_feature 514..531: note = Sequence encoding a linker
  misc_feature 532..1029: note = Sequence encoding TadA*8
  misc_feature 1030..1089: note = Sequence encoding Xten20 linker
  misc_feature 1090..3954: note = Sequence encoding BhCas12b
  misc_feature 3955..4002: note = Sequence encoding C-terminal NLS
  misc_feature 4003..4008: note = Sequence encoding GS linker
  misc_feature 4009..4089: note = Sequence encoding 3x hemagglutinin (HA) tag
  source 1..4092: mol_type = other DNA
gccaccatggccccaaagaagaagcggaaggtcggtatccacggagtcccagcagccgccaccagatccttcatcctgaagatcgagcccaacgaggaagtgaagaaaggcctctggaaaacccacgaggtgctgaaccacggaatcgcctactacatgaatatcctgaagctgatccggcaagaggccatctacgagcaccacgagcaggaccccaagaatcccaagaaggtgtccaaggccgagatccaggccgagctgtgggatttcgtgctgaagatgcagaagtgcaacagcttcacacacgaggtggacaaggacgaggtgttcaacatcctgagagagctgtacgaggaactggtgcccagcagcgtggaaaagaagggcgaagccaaccagctgagcaacaagtttctgtaccctctggtggaccccaacagccagtctggaaagggaacagccagcagcggcagaaagcccagatggtacaacctgaagattgccggcgatcccggaggctctggaggaagctccgaagtcgagttttcccatgagtactggatgagacacgcattgactctcgcaaagagggctcgagatgaacgcgaggtgcccgtgggggcagtactcgtgctcaacaatcgcgtaatcggcgaaggttggaatagggcaatcggactccacgaccccactgcacatgcggaaatcatggcccttcgacagggagggcttgtgatgcagaattatcgactttatgatgcgacgctgtacgtcacgtttgaaccttgcgtaatgtgcgcgggagctatgattcactcccgcattggacgagttgtattcggtgttcgcaacgccaagacgggtgccgcaggttcactgatggacgtgctgcatcatccaggcatgaaccaccgggtagaaatcacagaaggcatattggcggacgaatgtgcggcgctgttgtgtcgtttttttcgcatgcccaggcgggtctttaacgcccagaaaaaagcacaatcctctactgacggctcttctggatctgaaacacctggcacaagcgagagcgccacccctgagagctctggctcctgggaagaagagaagaagaagtgggaagaagataagaaaaaggacccgctggccaagatcctgggcaagctggctgagtacggactgatccctctgttcatcccctacaccgacagcaacgagcccatcgtgaaagaaatcaagtggatggaaaagtcccggaaccagagcgtgcggcggctggataaggacatgttcattcaggccctggaacggttcctgagctgggagagctggaacctgaaagtgaaagaggaatacgagaaggtcgagaaagagtacaagaccctggaagagaggatcaaagaggacatccaggctctgaaggctctggaacagtatgagaaagagcggcaagaacagctgctgcgggacaccctgaacaccaacgagtaccggctgagcaagagaggccttagaggctggcgggaaatcatccagaaatggctgaaaatggacgagaacgagccctccgagaagtacctggaagtgttcaaggactaccagcggaagcaccctagagaggccggcgattacagcgtgtacgagttcctgtccaagaaagagaaccacttcatctggcggaatcaccctgagtacccctacctgtacgccaccttctgcgagatcgacaagaaaaagaaggacgccaagcagcaggccaccttcacactggccgatcctatcaatcaccctctgtgggtccgattcgaggaaagaagcggcagcaacctgaacaagtacagaatcctgaccgagcagctgcacaccgagaagctgaagaaaaagctgacagtgcagctggaccggctgatctaccctacagaatctggcggctgggaagagaagggcaaagtggacattgtgctgctgcccagccggcagttctacaaccagatcttcctggacatcgaggaaaagggcaagcacgccttcacctacaaggatgagagcatcaagttccctctgaagggcacactcggcggagccagagtgcagttcgacagagatcacctgagaagataccctcacaaggtggaaagcggcaacgtgggcagaatctacttcaacatgaccgtgaacatcgagcctacagagtccccagtgtccaagtctctgaagatccaccgggacgacttccccaaggtggtcaacttcaagcccaaagaactgaccgagtggatcaaggacagcaagggcaagaaactgaagtccggcatcgagtccctggaaatcggcctgagagtgatgagcatcgacctgggacagagacaggccgctgccgcctctattttcgaggtggtggatcagaagcccgacatcgaaggcaagctgtttttcccaatcaagggcaccgagctgtatgccgtgcacagagccagcttcaacatcaagctgcccggcgagacactggtcaagagcagagaagtgctgcggaaggccagagaggacaatctgaaactgatgaaccagaagctcaacttcctgcggaacgtgctgcacttccagcagttcgaggacatcaccgagagagagaagcgggtcaccaagtggatcagcagacaagagaacagcgacgtgcccctggtgtaccaggatgagctgatccagatccgcgagctgatgtacaagccttacaaggactgggtcgccttcctgaagcagctccacaagagactggaagtcgagatcggcaaagaagtgaagcactggcggaagtccctgagcgacggaagaaagggcctgtacggcatctccctgaagaacatcgacgagatcgatcggacccggaagttcctgctgagatggtccctgaggcctaccgaacctggcgaagtgcgtagactggaacccggccagagattcgccatcgaccagctgaatcacctgaacgccctgaaagaagatcggctgaagaagatggccaacaccatcatcatgcacgccctgggctactgctacgacgtgcggaagaagaaatggcaggctaagaaccccgcctgccagatcatcctgttcgaggatctgagcaactacaacccctacgaggaaaggtcccgcttcgagaacagcaagctcatgaagtggtccagacgcgagatccccagacaggttgcactgcagggcgagatctatggcctgcaagtgggagaagtgggcgctcagttcagcagcagattccacgccaagacaggcagccctggcatcagatgtagcgtcgtgaccaaagagaagctgcaggacaatcggttcttcaagaatctgcagagagagggcagactgaccctggacaaaatcgccgtgctgaaagagggcgatctgtacccagacaaaggcggcgagaagttcatcagcctgagcaaggatcggaagtgcgtgaccacacacgccgacatcaacgccgctcagaacctgcagaagcggttctggacaagaacccacggcttctacaaggtgtactgcaaggcctaccaggtggacggccagaccgtgtacatccctgagagcaaggaccagaagcagaagatcatcgaagagttcggcgagggctacttcattctgaaggacggggtgtacgaatgggtcaacgccggcaagctgaaaatcaagaagggcagctccaagcagagcagcagcgagctggtggatagcgacatcctgaaagacagcttcgacctggcctccgagctgaaaggcgaaaagctgatgctgtacagggaccccagcggcaatgtgttccccagcgacaaatggatggccgctggcgtgttcttcggaaagctggaacgcatcctgatcagcaagctgaccaaccagtactccatcagcaccatcgaggacgacagcagcaagcagtctatgaaaaggccggcggccacgaaaaaggccggccaggcaaaaaagaaaaagggatcctacccatacgatgttccagattacgcttatccctacgacgtgcctgattatgcatacccatatgatgtccccgactatgcctaa

SEQ ID NO: 3 - protein, 1361 aa, synthetic construct
  REGION 1..1361: note = BhCas12b GGSGGS-ABE8-Xten20at P153 polypeptide sequence
MAPKKKRKVGIHGVPAAATRSFILKIEPNEEVKKGLWKTHEVLNHGIAYYMNILKLIRQEAIYEHHEQDPKNPKKVSKAEIQAELWDFVLKMQKCNSFTHEVDKDEVFNILRELYEELVPSSVEKKGEANQLSNKFLYPLVDPNSQSGKGTASSGRKPRWYNLKIAGDPGGSGGSSEVEFSHEYWMRHALTLAKRARDEREVPVGAVLVLNNRVIGEGWNRAIGLHDPTAHAEIMALRQGGLVMQNYRLYDATLYVTFEPCVMCAGAMIHSRIGRVVFGVRNAKTGAAGSLMDVLHHPGMNHRVEITEGILADECAALLCRFFRMPRRVFNAQKKAQSSTDGSSGSETPGTSESATPESSGSWEEEKKKWEEDKKKDPLAKILGKLAEYGLIPLFIPYTDSNEPIVKEIKWMEKSRNQSVRRLDKDMFIQALERFLSWESWNLKVKEEYEKVEKEYKTLEERIKEDIQALKALEQYEKERQEQLLRDTLNTNEYRLSKRGLRGWREIIQKWLKMDENEPSEKYLEVFKDYQRKHPREAGDYSVYEFLSKKENHFIWRNHPEYPYLYATFCEIDKKKKDAKQQATFTLADPINHPLWVRFEERSGSNLNKYRILTEQLHTEKLKKKLTVQLDRLIYPTESGGWEEKGKVDIVLLPSRQFYNQIFLDIEEKGKHAFTYKDESIKFPLKGTLGGARVQFDRDHLRRYPHKVESGNVGRIYFNMTVNIEPTESPVSKSLKIHRDDFPKVVNFKPKELTEWIKDSKGKKLKSGIESLEIGLRVMSIDLGQRQAAAASIFEVVDQKPDIEGKLFFPIKGTELYAVHRASFNIKLPGETLVKSREVLRKAREDNLKLMNQKLNFLRNVLHFQQFEDITEREKRVTKWISRQENSDVPLVYQDELIQIRELMYKPYKDWVAFLKQLHKRLEVEIGKEVKHWRKSLSDGRKGLYGISLKNIDEIDRTRKFLLRWSLRPTEPGEVRRLEPGQRFAIDQLNHLNALKEDRLKKMANTIIMHALGYCYDVRKKKWQAKNPACQIILFEDLSNYNPYEERSRFENSKLMKWSRREIPRQVALQGEIYGLQVGEVGAQFSSRFHAKTGSPGIRCSVVTKEKLQDNRFFKNLQREGRLTLDKIAVLKEGDLYPDKGGEKFISLSKDRKCVTTHADINAAQNLQKRFWTRTHGFYKVYCKAYQVDGQTVYIPESKDQKQKIIEEFGEGYFILKDGVYEWVNAGKLKIKKGSSKQSSSELVDSDILKDSFDLASELKGEKLMLYRDPSGNVFPSDKWMAAGVFFGKLERILISKLTNQYSISTIEDDSSKQSMKRPAATKKAGQAKKKKGSYPYDVPDYAYPYDVPDYAYPYDVPDYA

SEQ ID NO: 4 - DNA, 4092 bp, synthetic construct
  misc_feature 1..4092: note = BhCas12b GGSGGS-ABE8-Xten20at K255 polynucleotide sequence
  misc_feature 1..6: note = Kozak sequence
  misc_feature 7..57: note = Sequence encoding N-terminal nuclear localization signal (NLS)
  misc_feature 58..822: note = Sequence encoding BhCas12b
  misc_feature 823..840: note = Sequence encoding a linker
  misc_feature 841..1338: note = Sequence encoding TadA*8
  misc_feature 1339..1398: note = Sequence encoding Xten20 linker
  misc_feature 1399..3954: note = Sequence encoding BhCas12b
  misc_feature 3955..4002: note = Sequence encoding C-terminal NLS
  misc_feature 4003..4008: note = Sequence encoding a GS linker
  misc_feature 4009..4089: note = Sequence encoding 3x hemagglutinin (HA) tag
  source 1..4092: mol_type = other DNA
gccaccatggccccaaagaagaagcggaaggtcggtatccacggagtcccagcagccgccaccagatccttcatcctgaagatcgagcccaacgaggaagtgaagaaaggcctctggaaaacccacgaggtgctgaaccacggaatcgcctactacatgaatatcctgaagctgatccggcaagaggccatctacgagcaccacgagcaggaccccaagaatcccaagaaggtgtccaaggccgagatccaggccgagctgtgggatttcgtgctgaagatgcagaagtgcaacagcttcacacacgaggtggacaaggacgaggtgttcaacatcctgagagagctgtacgaggaactggtgcccagcagcgtggaaaagaagggcgaagccaaccagctgagcaacaagtttctgtaccctctggtggaccccaacagccagtctggaaagggaacagccagcagcggcagaaagcccagatggtacaacctgaagattgccggcgatccctcctgggaagaagagaagaagaagtgggaagaagataagaaaaaggacccgctggccaagatcctgggcaagctggctgagtacggactgatccctctgttcatcccctacaccgacagcaacgagcccatcgtgaaagaaatcaagtggatggaaaagtcccggaaccagagcgtgcggcggctggataaggacatgttcattcaggccctggaacggttcctgagctgggagagctggaacctgaaagtgaaagaggaatacgagaaggtcgagaaagagtacaagaccctggaagagaggatcaaaggaggctctggaggaagctccgaagtcgagttttcccatgagtactggatgagacacgcattgactctcgcaaagagggctcgagatgaacgcgaggtgcccgtgggggcagtactcgtgctcaacaatcgcgtaatcggcgaaggttggaatagggcaatcggactccacgaccccactgcacatgcggaaatcatggcccttcgacagggagggcttgtgatgcagaattatcgactttatgatgcgacgctgtacgtcacgtttgaaccttgcgtaatgtgcgcgggagctatgattcactcccgcattggacgagttgtattcggtgttcgcaacgccaagacgggtgccgcaggttcactgatggacgtgctgcatcatccaggcatgaaccaccgggtagaaatcacagaaggcatattggcggacgaatgtgcggcgctgttgtgtcgtttttttcgcatgcccaggcgggtctttaacgcccagaaaaaagcacaatcctctactgacggctcttctggatctgaaacacctggcacaagcgagagcgccacccctgagagctctggcgaggacatccaggctctgaaggctctggaacagtatgagaaagagcggcaagaacagctgctgcgggacaccctgaacaccaacgagtaccggctgagcaagagaggccttagaggctggcgggaaatcatccagaaatggctgaaaatggacgagaacgagccctccgagaagtacctggaagtgttcaaggactaccagcggaagcaccctagagaggccggcgattacagcgtgtacgagttcctgtccaagaaagagaaccacttcatctggcggaatcaccctgagtacccctacctgtacgccaccttctgcgagatcgacaagaaaaagaaggacgccaagcagcaggccaccttcacactggccgatcctatcaatcaccctctgtgggtccgattcgaggaaagaagcggcagcaacctgaacaagtacagaatcctgaccgagcagctgcacaccgagaagctgaagaaaaagctgacagtgcagctggaccggctgatctaccctacagaatctggcggctgggaagagaagggcaaagtggacattgtgctgctgcccagccggcagttctacaaccagatcttcctggacatcgaggaaaagggcaagcacgccttcacctacaaggatgagagcatcaagttccctctgaagggcacactcggcggagccagagtgcagttcgacagagatcacctgagaagataccctcacaaggtggaaagcggcaacgtgggcagaatctacttcaacatgaccgtgaacatcgagcctacagagtccccagtgtccaagtctctgaagatccaccgggacgacttccccaaggtggtcaacttcaagcccaaagaactgaccgagtggatcaaggacagcaagggcaagaaactgaagtccggcatcgagtccctggaaatcggcctgagagtgatgagcatcgacctgggacagagacaggccgctgccgcctctattttcgaggtggtggatcagaagcccgacatcgaaggcaagctgtttttcccaatcaagggcaccgagctgtatgccgtgcacagagccagcttcaacatcaagctgcccggcgagacactggtcaagagcagagaagtgctgcggaaggccagagaggacaatctgaaactgatgaaccagaagctcaacttcctgcggaacgtgctgcacttccagcagttcgaggacatcaccgagagagagaagcgggtcaccaagtggatcagcagacaagagaacagcgacgtgcccctggtgtaccaggatgagctgatccagatccgcgagctgatgtacaagccttacaaggactgggtcgccttcctgaagcagctccacaagagactggaagtcgagatcggcaaagaagtgaagcactggcggaagtccctgagcgacggaagaaagggcctgtacggcatctccctgaagaacatcgacgagatcgatcggacccggaagttcctgctgagatggtccctgaggcctaccgaacctggcgaagtgcgtagactggaacccggccagagattcgccatcgaccagctgaatcacctgaacgccctgaaagaagatcggctgaagaagatggccaacaccatcatcatgcacgccctgggctactgctacgacgtgcggaagaagaaatggcaggctaagaaccccgcctgccagatcatcctgttcgaggatctgagcaactacaacccctacgaggaaaggtcccgcttcgagaacagcaagctcatgaagtggtccagacgcgagatccccagacaggttgcactgcagggcgagatctatggcctgcaagtgggagaagtgggcgctcagttcagcagcagattccacgccaagacaggcagccctggcatcagatgtagcgtcgtgaccaaagagaagctgcaggacaatcggttcttcaagaatctgcagagagagggcagactgaccctggacaaaatcgccgtgctgaaagagggcgatctgtacccagacaaaggcggcgagaagttcatcagcctgagcaaggatcggaagtgcgtgaccacacacgccgacatcaacgccgctcagaacctgcagaagcggttctggacaagaacccacggcttctacaaggtgtactgcaaggcctaccaggtggacggccagaccgtgtacatccctgagagcaaggaccagaagcagaagatcatcgaagagttcggcgagggctacttcattctgaaggacggggtgtacgaatgggtcaacgccggcaagctgaaaatcaagaagggcagctccaagcagagcagcagcgagctggtggatagcgacatcctgaaagacagcttcgacctggcctccgagctgaaaggcgaaaagctgatgctgtacagggaccccagcggcaatgtgttccccagcgacaaatggatggccgctggcgtgttcttcggaaagctggaacgcatcctgatcagcaagctgaccaaccagtactccatcagcaccatcgaggacgacagcagcaagcagtctatgaaaaggccggcggccacgaaaaaggccggccaggcaaaaaagaaaaagggatcctacccatacgatgttccagattacgcttatccctacgacgtgcctgattatgcatacccatatgatgtccccgactatgcctaa

SEQ ID NO: 5 - protein, 1361 aa, synthetic construct
  REGION 1..1361: note = BhCas12b GGSGGS-ABE8-Xten20at K255 polypeptide sequence
MAPKKKRKVGIHGVPAAATRSFILKIEPNEEVKKGLWKTHEVLNHGIAYYMNILKLIRQEAIYEHHEQDPKNPKKVSKAEIQAELWDFVLKMQKCNSFTHEVDKDEVFNILRELYEELVPSSVEKKGEANQLSNKFLYPLVDPNSQSGKGTASSGRKPRWYNLKIAGDPSWEEEKKKWEEDKKKDPLAKILGKLAEYGLIPLFIPYTDSNEPIVKEIKWMEKSRNQSVRRLDKDMFIQALERFLSWESWNLKVKEEYEKVEKEYKTLEERIKGGSGGSSEVEFSHEYWMRHALTLAKRARDEREVPVGAVLVLNNRVIGEGWNRAIGLHDPTAHAEIMALRQGGLVMQNYRLYDATLYVTFEPCVMCAGAMIHSRIGRVVFGVRNAKTGAAGSLMDVLHHPGMNHRVEITEGILADECAALLCRFFRMPRRVFNAQKKAQSSTDGSSGSETPGTSESATPESSGEDIQALKALEQYEKERQEQLLRDTLNTNEYRLSKRGLRGWREIIQKWLKMDENEPSEKYLEVFKDYQRKHPREAGDYSVYEFLSKKENHFIWRNHPEYPYLYATFCEIDKKKKDAKQQATFTLADPINHPLWVRFEERSGSNLNKYRILTEQLHTEKLKKKLTVQLDRLIYPTESGGWEEKGKVDIVLLPSRQFYNQIFLDIEEKGKHAFTYKDESIKFPLKGTLGGARVQFDRDHLRRYPHKVESGNVGRIYFNMTVNIEPTESPVSKSLKIHRDDFPKVVNFKPKELTEWIKDSKGKKLKSGIESLEIGLRVMSIDLGQRQAAAASIFEVVDQKPDIEGKLFFPIKGTELYAVHRASFNIKLPGETLVKSREVLRKAREDNLKLMNQKLNFLRNVLHFQQFEDITEREKRVTKWISRQENSDVPLVYQDELIQIRELMYKPYKDWVAFLKQLHKRLEVEIGKEVKHWRKSLSDGRKGLYGISLKNIDEIDRTRKFLLRWSLRPTEPGEVRRLEPGQRFAIDQLNHLNALKEDRLKKMANTIIMHALGYCYDVRKKKWQAKNPACQIILFEDLSNYNPYEERSRFENSKLMKWSRREIPRQVALQGEIYGLQVGEVGAQFSSRFHAKTGSPGIRCSVVTKEKLQDNRFFKNLQREGRLTLDKIAVLKEGDLYPDKGGEKFISLSKDRKCVTTHADINAAQNLQKRFWTRTHGFYKVYCKAYQVDGQTVYIPESKDQKQKIIEEFGEGYFILKDGVYEWVNAGKLKIKKGSSKQSSSELVDSDILKDSFDLASELKGEKLMLYRDPSGNVFPSDKWMAAGVFFGKLERILISKLTNQYSISTIEDDSSKQSMKRPAATKKAGQAKKKKGSYPYDVPDYAYPYDVPDYAYPYDVPDYA

SEQ ID NO: 6 - DNA, 4092 bp, synthetic construct
  misc_feature 1..4092: note = BhCas12b GGSGGS-ABE8-Xten20at D306 polynucleotide sequence
  misc_feature 1..6: note = Kozak sequence
  misc_feature 7..57: note = Sequence encoding N-terminal nuclear localization signal (NLS)
  misc_feature 58..975: note = Sequence encoding BhCas12b
  misc_feature 976..993: note = Sequence encoding a linker
  misc_feature 994..1491: note = Sequence encoding TadA*8
  misc_feature 1492..1551: note = Sequence encoding Xten20 linker
  misc_feature 1552..3954: note = Sequence encoding BhCas12b
  misc_feature 3955..4002: note = Sequence encoding C-terminal NLS
  misc_feature 4003..4008: note = Sequence encoding a GS linker
  misc_feature 4009..4089: note = Sequence encoding 3x hemagglutinin (HA) tag
  source 1..4092: mol_type = other DNA
gccaccatggccccaaagaagaagcggaaggtcggtatccacggagtcccagcagccgccaccagatccttcatcctgaagatcgagcccaacgaggaagtgaagaaaggcctctggaaaacccacgaggtgctgaaccacggaatcgcctactacatgaatatcctgaagctgatccggcaagaggccatctacgagcaccacgagcaggaccccaagaatcccaagaaggtgtccaaggccgagatccaggccgagctgtgggatttcgtgctgaagatgcagaagtgcaacagcttcacacacgaggtggacaaggacgaggtgttcaacatcctgagagagctgtacgaggaactggtgcccagcagcgtggaaaagaagggcgaagccaaccagctgagcaacaagtttctgtaccctctggtggaccccaacagccagtctggaaagggaacagccagcagcggcagaaagcccagatggtacaacctgaagattgccggcgatccctcctgggaagaagagaagaagaagtgggaagaagataagaaaaaggacccgctggccaagatcctgggcaagctggctgagtacggactgatccctctgttcatcccctacaccgacagcaacgagcccatcgtgaaagaaatcaagtggatggaaaagtcccggaaccagagcgtgcggcggctggataaggacatgttcattcaggccctggaacggttcctgagctgggagagctggaacctgaaagtgaaagaggaatacgagaaggtcgagaaagagtacaagaccctggaagagaggatcaaagaggacatccaggctctgaaggctctggaacagtatgagaaagagcggcaagaacagctgctgcgggacaccctgaacaccaacgagtaccggctgagcaagagaggccttagaggctggcgggaaatcatccagaaatggctgaaaatggacggaggctctggaggaagctccgaagtcgagttttcccatgagtactggatgagacacgcattgactctcgcaaagagggctcgagatgaacgcgaggtgcccgtgggggcagtactcgtgctcaacaatcgcgtaatcggcgaaggttggaatagggcaatcggactccacgaccccactgcacatgcggaaatcatggcccttcgacagggagggcttgtgatgcagaattatcgactttatgatgcgacgctgtacgtcacgtttgaaccttgcgtaatgtgcgcgggagctatgattcactcccgcattggacgagttgtattcggtgttcgcaacgccaagacgggtgccgcaggttcactgatggacgtgctgcatcatccaggcatgaaccaccgggtagaaatcacagaaggcatattggcggacgaatgtgcggcgctgttgtgtcgtttttttcgcatgcccaggcgggtctttaacgcccagaaaaaagcacaatcctctactgacggctcttctggatctgaaacacctggcacaagcgagagcgccacccctgagagctctggcgagaacgagccctccgagaagtacctggaagtgttcaaggactaccagcggaagcaccctagagaggccggcgattacagcgtgtacgagttcctgtccaagaaagagaaccacttcatctggcggaatcaccctgagtacccctacctgtacgccaccttctgcgagatcgacaagaaaaagaaggacgccaagcagcaggccaccttcacactggccgatcctatcaatcaccctctgtgggtccgattcgaggaaagaagcggcagcaacctgaacaagtacagaatcctgaccgagcagctgcacaccgagaagctgaagaaaaagctgacagtgcagctggaccggctgatctaccctacagaatctggcggctgggaagagaagggcaaagtggacattgtgctgctgcccagccggcagttctacaaccagatcttcctggacatcgaggaaaagggcaagcacgccttcacctacaaggatgagagcatcaagttccctctgaagggcacactcggcggagccagagtgcagttcgacagagatcacctgagaagataccctcacaaggtggaaagcggcaacgtgggcagaatctacttcaacatgaccgtgaacatcgagcctacagagtccccagtgtccaagtctctgaagatccaccgggacgacttccccaaggtggtcaacttcaagcccaaagaactgaccgagtggatcaaggacagcaagggcaagaaactgaagtccggcatcgagtccctggaaatcggcctgagagtgatgagcatcgacctgggacagagacaggccgctgccgcctctattttcgaggtggtggatcagaagcccgacatcgaaggcaagctgtttttcccaatcaagggcaccgagctgtatgccgtgcacagagccagcttcaacatcaagctgcccggcgagacactggtcaagagcagagaagtgctgcggaaggccagagaggacaatctgaaactgatgaaccagaagctcaacttcctgcggaacgtgctgcacttccagcagttcgaggacatcaccgagagagagaagcgggtcaccaagtggatcagcagacaagagaacagcgacgtgcccctggtgtaccaggatgagctgatccagatccgcgagctgatgtacaagccttacaaggactgggtcgccttcctgaagcagctccacaagagactggaagtcgagatcggcaaagaagtgaagcactggcggaagtccctgagcgacggaagaaagggcctgtacggcatctccctgaagaacatcgacgagatcgatcggacccggaagttcctgctgagatggtccctgaggcctaccgaacctggcgaagtgcgtagactggaacccggccagagattcgccatcgaccagctgaatcacctgaacgccctgaaagaagatcggctgaagaagatggccaacaccatcatcatgcacgccctgggctactgctacgacgtgcggaagaagaaatggcaggctaagaaccccgcctgccagatcatcctgttcgaggatctgagcaactacaacccctacgaggaaaggtcccgcttcgagaacagcaagctcatgaagtggtccagacgcgagatccccagacaggttgcactgcagggcgagatctatggcctgcaagtgggagaagtgggcgctcagttcagcagcagattccacgccaagacaggcagccctggcatcagatgtagcgtcgtgaccaaagagaagctgcaggacaatcggttcttcaagaatctgcagagagagggcagactgaccctggacaaaatcgccgtgctgaaagagggcgatctgtacccagacaaaggcggcgagaagttcatcagcctgagcaaggatcggaagtgcgtgaccacacacgccgacatcaacgccgctcagaacctgcagaagcggttctggacaagaacccacggcttctacaaggtgtactgcaaggcctaccaggtggacggccagaccgtgtacatccctgagagcaaggaccagaagcagaagatcatcgaagagttcggcgagggctacttcattctgaaggacggggtgtacgaatgggtcaacgccggcaagctgaaaatcaagaagggcagctccaagcagagcagcagcgagctggtggatagcgacatcctgaaagacagcttcgacctggcctccgagctgaaaggcgaaaagctgatgctgtacagggaccccagcggcaatgtgttccccagcgacaaatggatggccgctggcgtgttcttcggaaagctggaacgcatcctgatcagcaagctgaccaaccagtactccatcagcaccatcgaggacgacagcagcaagcagtctatgaaaaggccggcggccacgaaaaaggccggccaggcaaaaaagaaaaagggatcctacccatacgatgttccagattacgcttatccctacgacgtgcctgattatgcatacccatatgatgtccccgactatgcctaa

SEQ ID NO: 7 - protein, 1361 aa, synthetic construct
  REGION 1..1361: note = BhCas12b GGSGGS-ABE8-Xten20at D306 polypeptide sequence
MAPKKKRKVGIHGVPAAATRSFILKIEPNEEVKKGLWKTHEVLNHGIAYYMNILKLIRQEAIYEHHEQDPKNPKKVSKAEIQAELWDFVLKMQKCNSFTHEVDKDEVFNILRELYEELVPSSVEKKGEANQLSNKFLYPLVDPNSQSGKGTASSGRKPRWYNLKIAGDPSWEEEKKKWEEDKKKDPLAKILGKLAEYGLIPLFIPYTDSNEPIVKEIKWMEKSRNQSVRRLDKDMFIQALERFLSWESWNLKVKEEYEKVEKEYKTLEERIKEDIQALKALEQYEKERQEQLLRDTLNTNEYRLSKRGLRGWREIIQKWLKMDGGSGGSSEVEFSHEYWMRHALTLAKRARDEREVPVGAVLVLNNRVIGEGWNRAIGLHDPTAHAEIMALRQGGLVMQNYRLYDATLYVTFEPCVMCAGAMIHSRIGRVVFGVRNAKTGAAGSLMDVLHHPGMNHRVEITEGILADECAALLCRFFRMPRRVFNAQKKAQSSTDGSSGSETPGTSESATPESSGENEPSEKYLEVFKDYQRKHPREAGDYSVYEFLSKKENHFIWRNHPEYPYLYATFCEIDKKKKDAKQQATFTLADPINHPLWVRFEERSGSNLNKYRILTEQLHTEKLKKKLTVQLDRLIYPTESGGWEEKGKVDIVLLPSRQFYNQIFLDIEEKGKHAFTYKDESIKFPLKGTLGGARVQFDRDHLRRYPHKVESGNVGRIYFNMTVNIEPTESPVSKSLKIHRDDFPKVVNFKPKELTEWIKDSKGKKLKSGIESLEIGLRVMSIDLGQRQAAAASIFEVVDQKPDIEGKLFFPIKGTELYAVHRASFNIKLPGETLVKSREVLRKAREDNLKLMNQKLNFLRNVLHFQQFEDITEREKRVTKWISRQENSDVPLVYQDELIQIRELMYKPYKDWVAFLKQLHKRLEVEIGKEVKHWRKSLSDGRKGLYGISLKNIDEIDRTRKFLLRWSLRPTEPGEVRRLEPGQRFAIDQLNHLNALKEDRLKKMANTIIMHALGYCYDVRKKKWQAKNPACQIILFEDLSNYNPYEERSRFENSKLMKWSRREIPRQVALQGEIYGLQVGEVGAQFSSRFHAKTGSPGIRCSVVTKEKLQDNRFFKNLQREGRLTLDKIAVLKEGDLYPDKGGEKFISLSKDRKCVTTHADINAAQNLQKRFWTRTHGFYKVYCKAYQVDGQTVYIPESKDQKQKIIEEFGEGYFILKDGVYEWVNAGKLKIKKGSSKQSSSELVDSDILKDSFDLASELKGEKLMLYRDPSGNVFPSDKWMAAGVFFGKLERILISKLTNQYSISTIEDDSSKQSMKRPAATKKAGQAKKKKGSYPYDVPDYAYPYDVPDYAYPYDVPDYA

SEQ ID NO: 8 - DNA, 4092 bp, synthetic construct
  misc_feature 1..4092: note = BhCas12b GGSGGS-ABE8-Xten20at D980 polynucleotide sequence
  misc_feature 1..6: note = Kozak sequence
  misc_feature 7..57: note = Sequence encoding N-terminal nuclear localization signal (NLS)
  misc_feature 58..2997: note = Sequence encoding BhCas12b
  misc_feature 2998..3015: note = Sequence encoding a linker
  misc_feature 3016..3513: note = Sequence encoding TadA*8
  misc_feature 3514..3573: note = Sequence encoding Xten20 linker
  misc_feature 3574..3954: note = Sequence encoding BhCas12b
  misc_feature 3955..4002: note = Sequence encoding C-terminal NLS
  misc_feature 4003..4008: note = Sequence encoding a GS linker
  misc_feature 4009..4089: note = Sequence encoding 3x hemagglutinin (HA) tag
  source 1..4092: mol_type = other DNA
gccaccatggccccaaagaagaagcggaaggtcggtatccacggagtcccagcagccgccaccagatccttcatcctgaagatcgagcccaacgaggaagtgaagaaaggcctctggaaaacccacgaggtgctgaaccacggaatcgcctactacatgaatatcctgaagctgatccggcaagaggccatctacgagcaccacgagcaggaccccaagaatcccaagaaggtgtccaaggccgagatccaggccgagctgtgggatttcgtgctgaagatgcagaagtgcaacagcttcacacacgaggtggacaaggacgaggtgttcaacatcctgagagagctgtacgaggaactggtgcccagcagcgtggaaaagaagggcgaagccaaccagctgagcaacaagtttctgtaccctctggtggaccccaacagccagtctggaaagggaacagccagcagcggcagaaagcccagatggtacaacctgaagattgccggcgatccctcctgggaagaagagaagaagaagtgggaagaagataagaaaaaggacccgctggccaagatcctgggcaagctggctgagtacggactgatccctctgttcatcccctacaccgacagcaacgagcccatcgtgaaagaaatcaagtggatggaaaagtcccggaaccagagcgtgcggcggctggataaggacatgttcattcaggccctggaacggttcctgagctgggagagctggaacctgaaagtgaaagaggaatacgagaaggtcgagaaagagtacaagaccctggaagagaggatcaaagaggacatccaggctctgaaggctctggaacagtatgagaaagagcggcaagaacagctgctgcgggacaccctgaacaccaacgagtaccggctgagcaagagaggccttagaggctggcgggaaatcatccagaaatggctgaaaatggacgagaacgagccctccgagaagtacctggaagtgttcaaggactaccagcggaagcaccctagagaggccggcgattacagcgtgtacgagttcctgtccaagaaagagaaccacttcatctggcggaatcaccctgagtacccctacctgtacgccaccttctgcgagatcgacaagaaaaagaaggacgccaagcagcaggccaccttcacactggccgatcctatcaatcaccctctgtgggtccgattcgaggaaagaagcggcagcaacctgaacaagtacagaatcctgaccgagcagctgcacaccgagaagctgaagaaaaagctgacagtgcagctggaccggctgatctaccctacagaatctggcggctgggaagagaagggcaaagtggacattgtgctgctgcccagccggcagttctacaaccagatcttcctggacatcgaggaaaagggcaagcacgccttcacctacaaggatgagagcatcaagttccctctgaagggcacactcggcggagccagagtgcagttcgacagagatcacctgagaagataccctcacaaggtggaaagcggcaacgtgggcagaatctacttcaacatgaccgtgaacatcgagcctacagagtccccagtgtccaagtctctgaagatccaccgggacgacttccccaaggtggtcaacttcaagcccaaagaactgaccgagtggatcaaggacagcaagggcaagaaactgaagtccggcatcgagtccctggaaatcggcctgagagtgatgagcatcgacctgggacagagacaggccgctgccgcctctattttcgaggtggtggatcagaagcccgacatcgaaggcaagctgtttttcccaatcaagggcaccgagctgtatgccgtgcacagagccagcttcaacatcaagctgcccggcgagacactggtcaagagcagagaagtgctgcggaaggccagagaggacaatctgaaactgatgaaccagaagctcaacttcctgcggaacgtgctgcacttccagcagttcgaggacatcaccgagagagagaagcgggtcaccaagtggatcagcagacaagagaacagcgacgtgcccctggtgtaccaggatgagctgatccagatccgcgagctgatgtacaagccttacaaggactgggtcgccttcctgaagcagctccacaagagactggaagtcgagatcggcaaagaagtgaagcactggcggaagtccctgagcgacggaagaaagggcctgtacggcatctccctgaagaacatcgacgagatcgatcggacccggaagttcctgctgagatggtccctgaggcctaccgaacctggcgaagtgcgtagactggaacccggccagagattcgccatcgaccagctgaatcacctgaacgccctgaaagaagatcggctgaagaagatggccaacaccatcatcatgcacgccctgggctactgctacgacgtgcggaagaagaaatggcaggctaagaaccccgcctgccagatcatcctgttcgaggatctgagcaactacaacccctacgaggaaaggtcccgcttcgagaacagcaagctcatgaagtggtccagacgcgagatccccagacaggttgcactgcagggcgagatctatggcctgcaagtgggagaagtgggcgctcagttcagcagcagattccacgccaagacaggcagccctggcatcagatgtagcgtcgtgaccaaagagaagctgcaggacaatcggttcttcaagaatctgcagagagagggcagactgaccctggacaaaatcgccgtgctgaaagagggcgatctgtacccagacaaaggcggcgagaagttcatcagcctgagcaaggatcggaagtgcgtgaccacacacgccgacatcaacgccgctcagaacctgcagaagcggttctggacaagaacccacggcttctacaaggtgtactgcaaggcctaccaggtggacggaggctctggaggaagctccgaagtcgagttttcccatgagtactggatgagacacgcattgactctcgcaaagagggctcgagatgaacgcgaggtgcccgtgggggcagtactcgtgctcaacaatcgcgtaatcggcgaaggttggaatagggcaatcggactccacgaccccactgcacatgcggaaatcatggcccttcgacagggagggcttgtgatgcagaattatcgactttatgatgcgacgctgtacgtcacgtttgaaccttgcgtaatgtgcgcgggagctatgattcactcccgcattggacgagttgtattcggtgttcgcaacgccaagacgggtgccgcaggttcactgatggacgtgctgcatcatccaggcatgaaccaccgggtagaaatcacagaaggcatattggcggacgaatgtgcggcgctgttgtgtcgtttttttcgcatgcccaggcgggtctttaacgcccagaaaaaagcacaatcctctactgacggctcttctggatctgaaacacctggcacaagcgagagcgccacccctgagagctctggcggccagaccgtgtacatccctgagagcaaggaccagaagcagaagatcatcgaagagttcggcgagggctacttcattctgaaggacggggtgtacgaatgggtcaacgccggcaagctgaaaatcaagaagggcagctccaagcagagcagcagcgagctggtggatagcgacatcctgaaagacagcttcgacctggcctccgagctgaaaggcgaaaagctgatgctgtacagggaccccagcggcaatgtgttccccagcgacaaatggatggccgctggcgtgttcttcggaaagctggaacgcatcctgatcagcaagctgaccaaccagtactccatcagcaccatcgaggacgacagcagcaagcagtctatgaaaaggccggcggccacgaaaaaggccggccaggcaaaaaagaaaaagggatcctacccatacgatgttccagattacgcttatccctacgacgtgcctgattatgcatacccatatgatgtccccgactatgcctaa

SEQ ID NO: 9 - protein, 1361 aa, synthetic construct
  REGION 1..1361: note = BhCas12b GGSGGS-ABE8-Xten20at D980 polypeptide sequence
MAPKKKRKVGIHGVPAAATRSFILKIEPNEEVKKGLWKTHEVLNHGIAYYMNILKLIRQEAIYEHHEQDPKNPKKVSKAEIQAELWDFVLKMQKCNSFTHEVDKDEVFNILRELYEELVPSSVEKKGEANQLSNKFLYPLVDPNSQSGKGTASSGRKPRWYNLKIAGDPSWEEEKKKWEEDKKKDPLAKILGKLAEYGLIPLFIPYTDSNEPIVKEIKWMEKSRNQSVRRLDKDMFIQALERFLSWESWNLKVKEEYEKVEKEYKTLEERIKEDIQALKALEQYEKERQEQLLRDTLNTNEYRLSKRGLRGWREIIQKWLKMDENEPSEKYLEVFKDYQRKHPREAGDYSVYEFLSKKENHFIWRNHPEYPYLYATFCEIDKKKKDAKQQATFTLADPINHPLWVRFEERSGSNLNKYRILTEQLHTEKLKKKLTVQLDRLIYPTESGGWEEKGKVDIVLLPSRQFYNQIFLDIEEKGKHAFTYKDESIKFPLKGTLGGARVQFDRDHLRRYPHKVESGNVGRIYFNMTVNIEPTESPVSKSLKIHRDDFPKVVNFKPKELTEWIKDSKGKKLKSGIESLEIGLRVMSIDLGQRQAAAASIFEVVDQKPDIEGKLFFPIKGTELYAVHRASFNIKLPGETLVKSREVLRKAREDNLKLMNQKLNFLRNVLHFQQFEDITEREKRVTKWISRQENSDVPLVYQDELIQIRELMYKPYKDWVAFLKQLHKRLEVEIGKEVKHWRKSLSDGRKGLYGISLKNIDEIDRTRKFLLRWSLRPTEPGEVRRLEPGQRFAIDQLNHLNALKEDRLKKMANTIIMHALGYCYDVRKKKWQAKNPACQIILFEDLSNYNPYEERSRFENSKLMKWSRREIPRQVALQGEIYGLQVGEVGAQFSSRFHAKTGSPGIRCSVVTKEKLQDNRFFKNLQREGRLTLDKIAVLKEGDLYPDKGGEKFISLSKDRKCVTTHADINAAQNLQKRFWTRTHGFYKVYCKAYQVDGGSGGSSEVEFSHEYWMRHALTLAKRARDEREVPVGAVLVLNNRVIGEGWNRAIGLHDPTAHAEIMALRQGGLVMQNYRLYDATLYVTFEPCVMCAGAMIHSRIGRVVFGVRNAKTGAAGSLMDVLHHPGMNHRVEITEGILADECAALLCRFFRMPRRVFNAQKKAQSSTDGSSGSETPGTSESATPESSGGQTVYIPESKDQKQKIIEEFGEGYFILKDGVYEWVNAGKLKIKKGSSKQSSSELVDSDILKDSFDLASELKGEKLMLYRDPSGNVFPSDKWMAAGVFFGKLERILISKLTNQYSISTIEDDSSKQSMKRPAATKKAGQAKKKKGSYPYDVPDYAYPYDVPDYAYPYDVPDYA

SEQ ID NO: 10 - DNA, 4092 bp, synthetic construct
  misc_feature 1..4092: note = BhCas12b GGSGGS-ABE8-Xten20at K1019 polynucleotide sequence
  misc_feature 1..6: note = Kozak sequence
  misc_feature 7..57: note = Sequence encoding N-terminal nuclear localization signal (NLS)
  misc_feature 58..3114: note = Sequence encoding BhCas12b
  misc_feature 3115..3132: note = Sequence encoding a linker
  misc_feature 3133..3630: note = Sequence encoding TadA*8
  misc_feature 3631..3690: note = Sequence encoding Xten20 linker
  misc_feature 3691..3954: note = Sequence encoding BhCas12b
  misc_feature 3955..4002: note = Sequence encoding C-terminal NLS
  misc_feature 4003..4008: note = Sequence encoding GS linker
  misc_feature 4009..4089: note = Sequence encoding 3x hemagglutinin (HA) tag
  source 1..4092: mol_type = other DNA
gccaccatggccccaaagaagaagcggaaggtcggtatccacggagtcccagcagccgccaccagatccttcatcctgaagatcgagcccaacgaggaagtgaagaaaggcctctggaaaacccacgaggtgctgaaccacggaatcgcctactacatgaatatcctgaagctgatccggcaagaggccatctacgagcaccacgagcaggaccccaagaatcccaagaaggtgtccaaggccgagatccaggccgagctgtgggatttcgtgctgaagatgcagaagtgcaacagcttcacacacgaggtggacaaggacgaggtgttcaacatcctgagagagctgtacgaggaactggtgcccagcagcgtggaaaagaagggcgaagccaaccagctgagcaacaagtttctgtaccctctggtggaccccaacagccagtctggaaagggaacagccagcagcggcagaaagcccagatggtacaacctgaagattgccggcgatccctcctgggaagaagagaagaagaagtgggaagaagataagaaaaaggacccgctggccaagatcctgggcaagctggctgagtacggactgatccctctgttcatcccctacaccgacagcaacgagcccatcgtgaaagaaatcaagtggatggaaaagtcccggaaccagagcgtgcggcggctggataaggacatgttcattcaggccctggaacggttcctgagctgggagagctggaacctgaaagtgaaagaggaatacgagaaggtcgagaaagagtacaagaccctggaagagaggatcaaagaggacatccaggctctgaaggctctggaacagtatgagaaagagcggcaagaacagctgctgcgggacaccctgaacaccaacgagtaccggctgagcaagagaggccttagaggctggcgggaaatcatccagaaatggctgaaaatggacgagaacgagccctccgagaagtacctggaagtgttcaaggactaccagcggaagcaccctagagaggccggcgattacagcgtgtacgagttcctgtccaagaaagagaaccacttcatctggcggaatcaccctgagtacccctacctgtacgccaccttctgcgagatcgacaagaaaaagaaggacgccaagcagcaggccaccttcacactggccgatcctatcaatcaccctctgtgggtccgattcgaggaaagaagcggcagcaacctgaacaagtacagaatcctgaccgagcagctgcacaccgagaagctgaagaaaaagctgacagtgcagctggaccggctgatctaccctacagaatctggcggctgggaagagaagggcaaagtggacattgtgctgctgcccagccggcagttctacaaccagatcttcctggacatcgaggaaaagggcaagcacgccttcacctacaaggatgagagcatcaagttccctctgaagggcacactcggcggagccagagtgcagttcgacagagatcacctgagaagataccctcacaaggtggaaagcggcaacgtgggcagaatctacttcaacatgaccgtgaacatcgagcctacagagtccccagtgtccaagtctctgaagatccaccgggacgacttccccaaggtggtcaacttcaagcccaaagaactgaccgagtggatcaaggacagcaagggcaagaaactgaagtccggcatcgagtccctggaaatcggcctgagagtgatgagcatcgacctgggacagagacaggccgctgccgcctctattttcgaggtggtggatcagaagcccgacatcgaaggcaagctgtttttcccaatcaagggcaccgagctgtatgccgtgcacagagccagcttcaacatcaagctgcccggcgagacactggtcaagagcagagaagtgctgcggaaggccagagaggacaatctgaaactgatgaaccagaagctcaacttcctgcggaacgtgctgcacttccagcagttcgaggacatcaccgagagagagaagcgggtcaccaagtggatcagcagacaagagaacagcgacgtgcccctggtgtaccaggatgagctgatccagatccgcgagctgatgtacaagccttacaaggactgggtcgccttcctgaagcagctccacaagagactggaagtcgagatcggcaaagaagtgaagcactggcggaagtccctgagcgacggaagaaagggcctgtacggcatctccctgaagaacatcgacgagatcgatcggacccggaagttcctgctgagatggtccctgaggcctaccgaacctggcgaagtgcgtagactggaacccggccagagattcgccatcgaccagctgaatcacctgaacgccctgaaagaagatcggctgaagaagatggccaacaccatcatcatgcacgccctgggctactgctacgacgtgcggaagaagaaatggcaggctaagaaccccgcctgccagatcatcctgttcgaggatctgagcaactacaacccctacgaggaaaggtcccgcttcgagaacagcaagctcatgaagtggtccagacgcgagatccccagacaggttgcactgcagggcgagatctatggcctgcaagtgggagaagtgggcgctcagttcagcagcagattccacgccaagacaggcagccctggcatcagatgtagcgtcgtgaccaaagagaagctgcaggacaatcggttcttcaagaatctgcagagagagggcagactgaccctggacaaaatcgccgtgctgaaagagggcgatctgtacccagacaaaggcggcgagaagttcatcagcctgagcaaggatcggaagtgcgtgaccacacacgccgacatcaacgccgctcagaacctgcagaagcggttctggacaagaacccacggcttctacaaggtgtactgcaaggcctaccaggtggacggccagaccgtgtacatccctgagagcaaggaccagaagcagaagatcatcgaagagttcggcgagggctacttcattctgaaggacggggtgtacgaatgggtcaacgccggcaagggaggctctggaggaagctccgaagtcgagttttcccatgagtactggatgagacacgcattgactctcgcaaagagggctcgagatgaacgcgaggtgcccgtgggggcagtactcgtgctcaacaatcgcgtaatcggcgaaggttggaatagggcaatcggactccacgaccccactgcacatgcggaaatcatggcccttcgacagggagggcttgtgatgcagaattatcgactttatgatgcgacgctgtacgtcacgtttgaaccttgcgtaatgtgcgcgggagctatgattcactcccgcattggacgagttgtattcggtgttcgcaacgccaagacgggtgccgcaggttcactgatggacgtgctgcatcatccaggcatgaaccaccgggtagaaatcacagaaggcatattggcggacgaatgtgcggcgctgttgtgtcgtttttttcgcatgcccaggcgggtctttaacgcccagaaaaaagcacaatcctctactgacggctcttctggatctgaaacacctggcacaagcgagagcgccacccctgagagctctggcctgaaaatcaagaagggcagctccaagcagagcagcagcgagctggtggatagcgacatcctgaaagacagcttcgacctggcctccgagctgaaaggcgaaaagctgatgctgtacagggaccccagcggcaatgtgttccccagcgacaaatggatggccgctggcgtgttcttcggaaagctggaacgcatcctgatcagcaagctgaccaaccagtactccatcagcaccatcgaggacgacagcagcaagcagtctatgaaaaggccggcggccacgaaaaaggccggccaggcaaaaaagaaaaagggatcctacccatacgatgttccagattacgcttatccctacgacgtgcctgattatgcatacccatatgatgtccccgactatgcctaa

SEQ ID NO: 11 - protein, 1361 aa, synthetic construct
  REGION 1..1361: note = BhCas12b GGSGGS-ABE8-Xten20at K1019 polypeptide sequence
MAPKKKRKVGIHGVPAAATRSFILKIEPNEEVKKGLWKTHEVLNHGIAYYMNILKLIRQEAIYEHHEQDPKNPKKVSKAEIQAELWDFVLKMQKCNSFTHEVDKDEVFNILRELYEELVPSSVEKKGEANQLSNKFLYPLVDPNSQSGKGTASSGRKPRWYNLKIAGDPSWEEEKKKWEEDKKKDPLAKILGKLAEYGLIPLFIPYTDSNEPIVKEIKWMEKSRNQSVRRLDKDMFIQALERFLSWESWNLKVKEEYEKVEKEYKTLEERIKEDIQALKALEQYEKERQEQLLRDTLNTNEYRLSKRGLRGWREIIQKWLKMDENEPSEKYLEVFKDYQRKHPREAGDYSVYEFLSKKENHFIWRNHPEYPYLYATFCEIDKKKKDAKQQATFTLADPINHPLWVRFEERSGSNLNKYRILTEQLHTEKLKKKLTVQLDRLIYPTESGGWEEKGKVDIVLLPSRQFYNQIFLDIEEKGKHAFTYKDESIKFPLKGTLGGARVQFDRDHLRRYPHKVESGNVGRIYFNMTVNIEPTESPVSKSLKIHRDDFPKVVNFKPKELTEWIKDSKGKKLKSGIESLEIGLRVMSIDLGQRQAAAASIFEVVDQKPDIEGKLFFPIKGTELYAVHRASFNIKLPGETLVKSREVLRKAREDNLKLMNQKLNFLRNVLHFQQFEDITEREKRVTKWISRQENSDVPLVYQDELIQIRELMYKPYKDWVAFLKQLHKRLEVEIGKEVKHWRKSLSDGRKGLYGISLKNIDEIDRTRKFLLRWSLRPTEPGEVRRLEPGQRFAIDQLNHLNALKEDRLKKMANTIIMHALGYCYDVRKKKWQAKNPACQIILFEDLSNYNPYEERSRFENSKLMKWSRREIPRQVALQGEIYGLQVGEVGAQFSSRFHAKTGSPGIRCSVVTKEKLQDNRFFKNLQREGRLTLDKIAVLKEGDLYPDKGGEKFISLSKDRKCVTTHADINAAQNLQKRFWTRTHGFYKVYCKAYQVDGQTVYIPESKDQKQKIIEEFGEGYFILKDGVYEWVNAGKGGSGGSSEVEFSHEYWMRHALTLAKRARDEREVPVGAVLVLNNRVIGEGWNRAIGLHDPTAHAEIMALRQGGLVMQNYRLYDATLYVTFEPCVMCAGAMIHSRIGRVVFGVRNAKTGAAGSLMDVLHHPGMNHRVEITEGILADECAALLCRFFRMPRRVFNAQKKAQSSTDGSSGSETPGTSESATPESSGLKIKKGSSKQSSSELVDSDILKDSFDLASELKGEKLMLYRDPSGNVFPSDKWMAAGVFFGKLERILISKLTNQYSISTIEDDSSKQSMKRPAATKKAGQAKKKKGSYPYDVPDYAYPYDVPDYAYPYDVPDYA

SEQ ID NO: 12 - protein, 208 aa, Petromyzon marinus
  REGION 1..208: note = MISC_FEATURE - tr|A5H718|A5H718_PETMA Cytosine deaminase OS=Petromyzon marinusOX=7757 PE=2 SV=1 amino acid sequence; PmCDA1 polypeptide sequence
MTDAEYVRIHEKLDIYTFKKQFFNNKKSVSHRCYVLFELKRRGERRACFWGYAVNKPQSGTERGIHAEIFSIRKVEEYLRDNPGQFTINWYSSWSPCADCAEKILEWYNQELRGNGHTLKIWACKLYYEKNARNQIGLWNLRDNGVGLNVMVSEHYQCCRKIFIQSSHNQLNENRWLEKTLKRAEKRRSELSIMIQVKILHTTKSPAV

SEQ ID NO: 13 - DNA, 766 bp, Petromyzon marinus
  misc_feature 1..766: note = EF094822.1 Petromyzon marinus isolate PmCDA.21 cytosine deaminase mRNA, complete cds; PmCDA1 polynucleotide sequence
  source 1..766: mol_type = genomic DNA
tgacacgacacagccgtgtatatgaggaagggtagctggatggggggggggggaatacgttcagagaggacattagcgagcgtcttgttggtggccttgagtctagacacctgcagacatgaccgacgctgagtacgtgagaatccatgagaagttggacatctacacgtttaagaaacagtttttcaacaacaaaaaatccgtgtcgcatagatgctacgttctctttgaattaaaacgacggggtgaacgtagagcgtgtttttggggctatgctgtgaataaaccacagagcgggacagaacgtggaattcacgccgaaatctttagcattagaaaagtcgaagaatacctgcgcgacaaccccggacaattcacgataaattggtactcatcctggagtccttgtgcagattgcgctgaaaagatcttagaatggtataaccaggagctgcgggggaacggccacactttgaaaatctgggcttgcaaactctattacgagaaaaatgcgaggaatcaaattgggctgtggaacctcagagataacggggttgggttgaatgtaatggtaagtgaacactaccaatgttgcaggaaaatattcatccaatcgtcgcacaatcaattgaatgagaatagatggcttgagaagactttgaagcgagctgaaaaacgacggagcgagttgtccattatgattcaggtaaaaatactccacaccactaagagtcctgctgtttaagaggctatgcggatggttttc

SEQ ID NO: 14 - protein, 145 aa, Homo sapiens
  REGION 1..145: note = MISC_FEATURE - tr|Q6QJ80|Q6QJ80_HUMAN Activation-induced cytidine deaminase OS=Homo sapiens; OX = 9606 GN=AICDA PE=2 SV=1; AID polypeptide sequence
MDSLLMNRRKFLYQFKNVRWAKGRRETYLCYVVKRRDSATSFSLDFGYLRNKNGCHVELLFLRYISDWDLDPGRCYRVTWFTSWSPCYDCARHVADFLRGNPNLSLRIFTARLYFCEDRKAEPEGLRRLHRAGVQIAIMTFKAPV

SEQ ID NO: 15 - DNA, 10681 bp, Homo sapiens
  misc_feature 1..10681: note = NG_011588.1:5001-15681 Homo sapiens activation induced cytidine deaminase (AICDA), RefSeqGene (LRG_17) on chromosome 12; nucleic acid sequence of the CDS of human AID; polynucleotide sequence
  source 1..10681: mol_type = genomic DNA
agagaaccatcattaattgaagtgagatttttctggcctgagacttgcagggaggcaagaagacactctggacaccactatggacaggtaaagaggcagtcttctcgtgggtgattgcactggccttcctctcagagcaaatctgagtaatgagactggtagctatccctttctctcatgtaactgtctgactgataagatcagcttgatcaatatgcatatatattttttgatctgtctccttttcttctattcagatcttatacgctgtcagcccaattctttctgtttcagacttctcttgatttccctctttttcatgtggcaaaagaagtagtgcgtacaatgtactgattcgtcctgagatttgtaccatggttgaaactaatttatggtaataatattaacatagcaaatctttagagactcaaatcatgaaaaggtaatagcagtactgtactaaaaacggtagtgctaattttcgtaataattttgtaaatattcaacagtaaaacaacttgaagacacactttcctagggaggcgttactgaaataatttagctatagtaagaaaatttgtaattttagaaatgccaagcattctaaattaattgcttgaaagtcactatgattgtgtccattataaggagacaaattcattcaagcaagttatttaatgttaaaggcccaattgttaggcagttaatggcacttttactattaactaatctttccatttgttcagacgtagcttaacttacctcttaggtgtgaatttggttaaggtcctcataatgtctttatgtgcagtttttgataggttattgtcatagaacttattctattcctacatttatgattactatggatgtatgagaataacacctaatccttatactttacctcaatttaactcctttataaagaacttacattacagaataaagattttttaaaaatatatttttttgtagagacagggtcttagcccagccgaggctggtctctaagtcctggcccaagcgatcctcctgcctgggcctcctaaagtgctggaattatagacatgagccatcacatccaatatacagaataaagatttttaatggaggatttaatgttcttcagaaaattttcttgaggtcagacaatgtcaaatgtctcctcagtttacactgagattttgaaaacaagtctgagctataggtccttgtgaagggtccattggaaatacttgttcaaagtaaaatggaaagcaaaggtaaaatcagcagttgaaattcagagaaagacagaaaaggagaaaagatgaaattcaacaggacagaagggaaatatattatcattaaggaggacagtatctgtagagctcattagtgatggcaaaatgacttggtcaggattatttttaacccgcttgtttctggtttgcacggctggggatgcagctagggttctgcctcagggagcacagctgtccagagcagctgtcagcctgcaagcctgaaacactccctcggtaaagtccttcctactcaggacagaaatgacgagaacagggagctggaaacaggcccctaaccagagaagggaagtaatggatcaacaaagttaactagcaggtcaggatcacgcaattcatttcactctgactggtaacatgtgacagaaacagtgtaggcttattgtattttcatgtagagtaggacccaaaaatccacccaaagtcctttatctatgccacatccttcttatctatacttccaggacactttttcttccttatgataaggctctctctctctccacacacacacacacacacacacacacacacacacacacacacacaaacacacaccccgccaaccaaggtgcatgtaaaaagatgtagattcctctgcctttctcatctacacagcccaggagggtaagttaatataagagggatttattggtaagagatgatgcttaatctgtttaacactgggcctcaaagagagaatttcttttcttctgtacttattaagcacctattatgtgttgagcttatatatacaaagggttattatatgctaatatagtaatagtaatggtggttggtactatggtaattaccataaaaattattatccttttaaaataaagctaattattattggatcttttttagtattcattttatgttttttatgtttttgattttttaaaagacaatctcaccctgttacccaggctggagtgcagtggtgcaatcatagctttctgcagtcttgaactcctgggctcaagcaatcctcctgccttggcctcccaaagtgttgggatacagtcatgagccactgcatctggcctaggatccatttagattaaaatatgcattttaaattttaaaataatatggctaatttttaccttatgtaatgtgtatactggcaataaatctagtttgctgcctaaagtttaaagtgctttccagtaagcttcatgtacgtgaggggagacatttaaagtgaaacagacagccaggtgtggtggctcacgcctgtaatcccagcactctgggaggctgaggtgggtggatcgcttgagccctggagttcaagaccagcctgagcaacatggcaaaacgctgtttctataacaaaaattagccgggcatggtggcatgtgcctgtggtcccagctactagggggctgaggcaggagaatcgttggagcccaggaggtcaaggctgcactgagcagtgcttgcgccactgcactccagcctgggtgacaggaccagaccttgcctcaaaaaaataagaagaaaaattaaaaataaatggaaacaactacaaagagctgttgtcctagatgagctacttagttaggctgatattttggtatttaacttttaaagtcagggtctgtcacctgcactacattattaaaatatcaattctcaatgtatatccacacaaagactggtacgtgaatgttcatagtacctttattcacaaaaccccaaagtagagactatccaaatatccatcaacaagtgaacaaataaacaaaatgtgctatatccatgcaatggaataccaccctgcagtacaaagaagctacttggggatgaatcccaaagtcatgacgctaaatgaaagagtcagacatgaaggaggagataatgtatgccatacgaaattctagaaaatgaaagtaacttatagttacagaaagcaaatcagggcaggcatagaggctcacacctgtaatcccagcactttgagaggccacgtgggaagattgctagaactcaggagttcaagaccagcctgggcaacacagtgaaactccattctccacaaaaatgggaaaaaaagaaagcaaatcagtggttgtcctgtggggaggggaaggactgcaaagagggaagaagctctggtggggtgagggtggtgattcaggttctgtatcctgactgtggtagcagtttggggtgtttacatccaaaaatattcgtagaattatgcatcttaaatgggtggagtttactgtatgtaaattatacctcaatgtaagaaaaaataatgtgtaagaaaactttcaattctcttgccagcaaacgttattcaaattcctgagccctttacttcgcaaattctctgcacttctgccccgtaccattaggtgacagcactagctccacaaattggataaatgcatttctggaaaagactagggacaaaatccaggcatcacttgtgctttcatatcaaccatgctgtacagcttgtgttgctgtctgcagctgcaatggggactcttgatttctttaaggaaacttgggttaccagagtatttccacaaatgctattcaaattagtgcttatgatatgcaagacactgtgctaggagccagaaaacaaagaggaggagaaatcagtcattatgtgggaacaacatagcaagatatttagatcattttgactagttaaaaaagcagcagagtacaaaatcacacatgcaatcagtataatccaaatcatgtaaatatgtgcctgtagaaagactagaggaataaacacaagaatcttaacagtcattgtcattagacactaagtctaattattattattagacactatgatatttgagatttaaaaaatctttaatattttaaaatttagagctcttctatttttccatagtattcaagtttgacaatgatcaagtattactctttctttttttttttttttttttttttttgagatggagttttggtcttgttgcccatgctggagtggaatggcatgaccatagctcactgcaacctccacctcctgggttcaagcaaagctgtcgcctcagcctcccgggtagatgggattacaggcgcccaccaccacactcggctaatgtttgtatttttagtagagatggggtttcaccatgttggccaggctggtctcaaactcctgacctcagaggatccacctgcctcagcctcccaaagtgctgggattacagatgtaggccactgcgcccggccaagtattgctcttatacattaaaaaacaggtgtgagccactgcgcccagccaggtattgctcttatacattaaaaaataggccggtgcagtggctcacgcctgtaatcccagcactttgggaagccaaggcgggcagaacacccgaggtcaggagtccaaggccagcctggccaagatggtgaaaccccgtctctattaaaaatacaaacattacctgggcatgatggtgggcgcctgtaatcccagctactcaggaggctgaggcaggaggatccgcggagcctggcagatctgcctgagcctgggaggttgaggctacagtaagccaagatcatgccagtatacttcagcctgggcgacaaagtgagaccgtaacaaaaaaaaaaaaatttaaaaaaagaaatttagatcaagatccaactgtaaaaagtggcctaaacaccacattaaagagtttggagtttattctgcaggcagaagagaaccatcagggggtcttcagcatgggaatggcatggtgcacctggtttttgtgagatcatggtggtgacagtgtggggaatgttattttggagggactggaggcagacagaccggttaaaaggccagcacaacagataaggaggaagaagatgagggcttggaccgaagcagagaagagcaaacagggaaggtacaaattcaagaaatattggggggtttgaatcaacacatttagatgattaattaaatatgaggactgaggaataagaaatgagtcaaggatggttccaggctgctaggctgcttacctgaggtggcaaagtcgggaggagtggcagtttaggacagggggcagttgaggaatattgttttgatcattttgagtttgaggtacaagttggacacttaggtaaagactggaggggaaatctgaatatacaattatgggactgaggaacaagtttattttattttttgtttcgttttcttgttgaagaacaaatttaattgtaatcccaagtcatcagcatctagaagacagtggcaggaggtgactgtcttgtgggtaagggtttggggtccttgatgagtatctctcaattggccttaaatataagcaggaaaaggagtttatgatggattccaggctcagcagggctcaggagggctcaggcagccagcagaggaagtcagagcatcttctttggtttagcccaagtaatgacttccttaaaaagctgaaggaaaatccagagtgaccagattataaactgtactcttgcattttctctccctcctctcacccacagcctcttgatgaaccggaggaagtttctttaccaattcaaaaatgtccgctgggctaagggtcggcgtgagacctacctgtgctacgtagtgaagaggcgtgacagtgctacatccttttcactggactttggttatcttcgcaataaggtatcaattaaagtcggctttgcaagcagtttaatggtcaactgtgagtgcttttagagccacctgctgatggtattacttccatccttttttggcatttgtgtctctatcacattcctcaaatccttttttttatttctttttccatgtccatgcacccatattagacatggcccaaaatatgtgatttaattcctccccagtaatgctgggcaccctaataccactccttccttcagtgccaagaacaactgctcccaaactgtttaccagctttcctcagcatctgaattgcctttgagattaattaagctaaaagcatttttatatgggagaatattatcagcttgtccaagcaaaaattttaaatgtgaaaaacaaattgtgtcttaagcatttttgaaaattaaggaagaagaatttgggaaaaaattaacggtggctcaattctgtcttccaaatgatttcttttccctcctactcacatgggtcgtaggccagtgaatacattcaacatggtgatccccagaaaactcagagaagcctcggctgatgattaattaaattgatctttcggctacccgagagaattacatttccaagagacttcttcaccaaaatccagatgggtttacataaacttctgcccacgggtatctcctctctcctaacacgctgtgacgtctgggcttggtggaatctcagggaagcatccgtggggtggaaggtcatcgtctggctcgttgtttgatggttatattaccatgcaattttctttgcctacatttgtattgaatacatcccaatctccttcctattcggtgacatgacacattctatttcagaaggctttgattttatcaagcactttcatttacttctcatggcagtgcctattacttctcttacaatacccatctgtctgctttaccaaaatctatttccccttttcagatcctcccaaatggtcctcataaactgtcctgcctccacctagtggtccaggtatatttccacaatgttacatcaacaggcacttctagccattttccttctcaaaaggtgcaaaaagcaacttcataaacacaaattaaatcttcggtgaggtagtgtgatgctgcttcctcccaactcagcgcacttcgtcttcctcattccacaaaaacccatagccttccttcactctgcaggactagtgctgccaagggttcagctctacctactggtgtgctcttttgagcaagttgcttagcctctctgtaacacaaggacaatagctgcaagcatccccaaagatcattgcaggagacaatgactaaggctaccagagccgcaataaaagtcagtgaattttagcgtggtcctctctgtctctccagaacggctgccacgtggaattgctcttcctccgctacatctcggactgggacctagaccctggccgctgctaccgcgtcacctggttcacctcctggagcccctgctacgactgtgcccgacatgtggccgactttctgcgagggaaccccaacctcagtctgaggatcttcaccgcgcgcctctacttctgtgaggaccgcaaggctgagcccgaggggctgcggcggctgcaccgcgccggggtgcaaatagccatcatgaccttcaaaggtgcgaaagggccttccgcgcaggcgcagtgcagcagcccgcattcgggattgcgatgcggaatgaatgagttagtggggaagctcgaggggaagaagtgggcggggattctggttcacctctggagccgaaattaaagattagaagcagagaaaagagtgaatggctcagagacaaggccccgaggaaatgagaaaatggggccagggttgcttctttcccctcgatttggaacctgaactgtcttctacccccatatccccgcctttttttcctttttttttttttgaagattatttttactgctggaatacttttgtagaaaaccacgaaagaactttcaaagcctgggaagggctgcatgaaaattcagttcgtctctccagacagcttcggcgcatccttttggtaaggggcttcctcgctttttaaattttctttctttctctacagtcttttttggagtttcgtatatttcttatattttcttattgttcaatcactctcagttttcatctgatgaaaactttatttctcctccacatcagctttttcttctgctgtttcaccattcagagccctctgctaaggttccttttccctcccttttctttcttttgttgtttcacatctttaaatttctgtctctccccagggttgcgtttccttcctggtcagaattcttttctcctttttttttttttttttttttttttttaaacaaacaaacaaaaaacccaaaaaaactctttcccaatttactttcttccaacatgttacaaagccatccactcagtttagaagactctccggccccaccgacccccaacctcgttttgaagccattcactcaatttgcttctctctttctctacagcccctgtatgaggttgatgacttacgagacgcatttcgtactttgggactttgatagcaacttccaggaatgtcacacacgatgaaatatctctgctgaagacagtggataaaaaacagtccttcaagtcttctctgtttttattcttcaactctcactttcttagagtttacagaaaaaatatttatatacgactctttaaaaagatctatgtcttgaaaatagagaaggaacacaggtctggccagggacgtgctgcaattggtgcagttttgaatgcaacattgtcccctactgggaataacagaactgcaggacctgggagcatcctaaagtgtcaacgtttttctatgacttttaggtaggatgagagcagaaggtagatcctaaaaagcatggtgagaggatcaaatgtttttatatcaacatcctttattatttgattcatttgagttaacagtggtgttagtgatagatttttctattcttttcccttgacgtttactttcaagtaacacaaactcttccatcaggccatgatctataggacctcctaatgagagtatctgggtgattgtgaccccaaaccatctctccaaagcattaatatccaatcatgcgctgtatgttttaatcagcagaagcatgtttttatgtttgtacaaaagaagattgttatgggtggggatggaggtatagaccatgcatggtcaccttcaagctactttaataaaggatcttaaaatgggcaggaggactgtgaacaagacaccctaataatgggttgatgtctgaagtagcaaatcttctggaaacgcaaactcttttaaggaagtccctaatttagaaacacccacaaacttcacatatcataattagcaaacaattggaaggaagttgcttgaatgttggggagaggaaaatctattggctctcgtgggtctcttcatctcagaaatgccaatcaggtcaaggtttgctacattttgtatgtgtgtgatgcttctcccaaaggtatattaactatataagagagttgtgacaaaacagaatgataaagctgcgaaccgtggcacacgctcatagttctagctgcttgggaggttgaggagggaggatggcttgaacacaggtgttcaaggccagcctgggcaacataacaagatcctgtctctcaaaaaaaaaaaaaaaaaaaagaaagagagagggccgggcgtggtggctcacgcctgtaatcccagcactttgggaggccgagccgggcggatcacctgtggtcaggagtttgagaccagcctggccaacatggcaaaaccccgtctgtactcaaaatgcaaaaattagccaggcgtggtagcaggcacctgtaatcccagctacttgggaggctgaggcaggagaatcgcttgaacccaggaggtggaggttgcagtaagctgagatcgtgccgttgcactccagcctgggcgacaagagcaagactctgtctcagaaaaaaaaaaaaaaaagagagagagagagaaagagaacaatatttgggagagaaggatggggaagcattgcaaggaaattgtgctttatccaacaaaatgtaaggagccaataagggatccctatttgtctcttttggtgtctatttgtccctaacaactgtctttgacagtgagaaaaatattcagaataaccatatccctgtgccgttattacctagcaacccttgcaatgaagatgagcagatccacaggaaaacttgaatgcacaactgtcttattttaatcttattgtacataagtttgtaaaagagttaaaaattgttacttcatgtattcatttatattttatattattttgcgtctaatgattttttattaacatgatttccttttctgatatattgaaatggagtctcaaagcttcataaatttataactttagaaatgattctaataacaacgtatgtaattgtaacattgcagtaatggtgctacgaagccatttctcttgatttttagtaaacttttatgacagcaaatttgcttctggctcactttcaatcagttaaataaatgataaataattttggaagctgtgaagataaaataccaaataaaataatataaaagtgatttatatgaagttaaaataaaaaatcagtatgatggaataaacttg

SEQ ID NO: 16 - protein, 198 aa, Homo sapiens [sequence omitted]

SEQ ID NO: 17 - protein, 198 aa, Canis lupus
  REGION 1..198: note = MISC_FEATURE - Canine AID (clAID) polypeptide sequence
  REGION 1..30: note = MISC_FEATURE - Nuclear localization sequence
  REGION 183..198: note = MISC_FEATURE - Nuclear export signal
MDSLLMKQRKFLYHFKNVRWAKGRHETYLCYVVKRRDSATSFSLDFGHLRNKSGCHVELLFLRYISDWDLDPGRCYRVTWFTSWSPCYDCARHVADFLRGYPNLSLRIFAARLYFCEDRKAEPEGLRRLHRAGVQIAIMTFKDYFYCWNTFVENREKTFKAWEGLHENSVRLSRQLRRILLPLYEVDDLRDAFRTLGL

SEQ ID NO: 18 - protein, 199 aa, Bos taurus
  REGION 1..199: note = MISC_FEATURE - Bovine AID (btAID) polypeptide sequence
  REGION 1..30: note = MISC_FEATURE - Nuclear localization sequence
  REGION 183..199: note = MISC_FEATURE - Nuclear export signal
MDSLLKKQRQFLYQFKNVRWAKGRHETYLCYVVKRRDSPTSFSLDFGHLRNKAGCHVELLFLRYISDWDLDPGRCYRVTWFTSWSPCYDCARHVADFLRGYPNLSLRIFTARLYFCDKERKAEPEGLRRLHRAGVQIAIMTFKDYFYCWNTFVENHERTFKAWEGLHENSVRLSRQLRRILLPLYEVDDLRDAFRTLGL

SEQ ID NO: 19 - protein, 239 aa, Rattus sp.
  REGION 1..239: note = MISC_FEATURE - Rat AID polypeptide sequence
  REGION 1..26: note = MISC_FEATURE - Nuclear localization sequence
  REGION 194..239: note = MISC_FEATURE - Nuclear export signal
MAVGSKPKAALVGPHWERERIWCFLCSTGLGTQQTGQTSRWLRPAATQDPVSPPRSLLMKQRKFLYHFKNVRWAKGRHETYLCYVVKRRDSATSFSLDFGYLRNKSGCHVELLFLRYISDWDLDPGRCYRVTWFTSWSPCYDCARHVADFLRGNPNLSLRIFTARLTGWGALPAGLMSPARPSDYFYCWNTFVENHERTFKAWEGLHENSVRLSRRLRRILLPLYEVDDLRDAFRTLGL

SEQ ID NO: 20 - protein, 198 aa, Mus musculus [sequence omitted]

SEQ ID NO: 21 - protein, 229 aa, Rattus norvegicus [sequence omitted]

SEQ ID NO: 22 - protein, 229 aa, Mesocricetus auratus
  REGION 1..229: note = MISC_FEATURE - maAPOBEC-1 polypeptide sequence
MSSETGPVVVDPTLRRRIEPHEFDAFFDQGELRKETCLLYEIRWGGRHNIWRHTGQNTSRHVEINFIEKFTSERYFYPSTRCSIVWFLSWSPCGECSKAITEFLSGHPNVTLFIYAARLYHHTDQRNRQGLRDLISRGVTIRIMTEQEYCYCWRNFVNYPPSNEVYWPRYPNLWMRLYALELYCIHLGLPPCLKIKRRHQYPLTFFRLNLQSCHYQRIPPHILWATGFI

SEQ ID NO: 23 - protein, 236 aa, Pongo pygmaeus
  REGION 1..236: note = MISC_FEATURE - ppAPOBEC-1 polypeptide sequence
MTSEKGPSTGDPTLRRRIESWEFDVFYDPRELRKETCLLYEIKWGMSRKIWRSSGKNTTNHVEVNFIKKFTSERRFHSSISCSITWFLSWSPCWECSQAIREFLSQHPGVTLVIYVARLFWHMDQRNRQGLRDLVNSGVTIQIMRASEYYHCWRNFVNYPPGDEAHWPQYPPLWMMLYALELHCIILSLPPCLKISRRWQNHLAFFRLHLQNCHYQTIPPHILLATGLIHPSVTWR

SEQ ID NO: 24 - protein, 236 aa, Oryctolagus cuniculus
  REGION 1..236: note = MISC_FEATURE - ocAPOBEC1 polypeptide sequence
MASEKGPSNKDYTLRRRIEPWEFEVFFDPQELRKEACLLYEIKWGASSKTWRSSGKNTTNHVEVNFLEKLTSEGRLGPSTCCSITWFLSWSPCWECSMAIREFLSQHPGVTLIIFVARLFQHMDRRNRQGLKDLVTSGVTVRVMSVSEYCYCWENFVNYPPGKAAQWPRYPPRWMLMYALELYCIILGLPPCLKISRRHQKQLTFFSLTPQYCHYKMIPPYILLATGLLQPSVPWR

SEQ ID NO: 25 - protein, 235 aa, Monodelphis domestica
  REGION 1..235: note = MISC_FEATURE - mdAPOBEC-1 polypeptide sequence
MNSKTGPSVGDATLRRRIKPWEFVAFFNPQELRKETCLLYEIKWGNQNIWRHSNQNTSQHAEINFMEKFTAERHFNSSVRCSITWFLSWSPCWECSKAIRKFLDHYPNVTLAIFISRLYWHMDQQHRQGLKELVHSGVTIQIMSYSEYHYCWRNFVDYPQGEEDYWPKYPYLWIMLYVLELHCIILGLPPCLKISGSHSNQLALFSLDLQDCHYQKIPYNVLVATGLVQPFVTWR

SEQ ID NO: 26 - protein, 224 aa, Pongo pygmaeus
  REGION 1..224: note = MISC_FEATURE - ppAPOBEC-2 polypeptide sequence
MAQKEEAAAATEAASQNGEDLENLDDPEKLKELIELPPFEIVTGERLPANFFKFQFRNVEYSSGRNKTFLCYVVEAQGKGGQVQASRGYLEDEHAAAHAEEAFFNTILPAFDPALRYNVTWYVSSSPCAACADRIIKTLSKTKNLRLLILVGRLFMWEELEIQDALKKLKEAGCKLRIMKPQDFEYVWQNFVEQEEGESKAFQPWEDIQENFLYYEEKLADILK

SEQ ID NO: 27 - protein, 224 aa, Bos taurus
  REGION 1..224: note = MISC_FEATURE - btAPOBEC-2 polypeptide sequence
MAQKEEAAAAAEPASQNGEEVENLEDPEKLKELIELPPFEIVTGERLPAHYFKFQFRNVEYSSGRNKTFLCYVVEAQSKGGQVQASRGYLEDEHATNHAEEAFFNSIMPTFDPALRYMVTWYVSSSPCAACADRIVKTLNKTKNLRLLILVGRLFMWEEPEIQAALRKLKEAGCRLRIMKPQDFEYIWQNFVEQEEGESKAFEPWEDIQENFLYYEEKLADILK

SEQ ID NO: 28 - protein, 440 aa, Mus musculus
  REGION 1..440: note = MISC_FEATURE - mAPOBEC-3-(1) polypeptide sequence
MQPQRLGPRAGMGPFCLGCSHRKCYSPIRNLISQETFKFHFKNLGYAKGRKDTFLCYEVTRKDCDSPVSLHHGVFKNKDNIHAEICFLYWFHDKVLKVLSPREEFKITWYMSWSPCFECAEQIVRFLATHHNLSLDIFSSRLYNVQDPETQQNLCRLVQEGAQVAAMDLYEFKKCWKKFVDNGGRRFRPWKRLLTNFRYQDSKLQEILRPCYISVPSSSSSTLSNICLTKGLPETRFWVEGRRMDPLSEEEFYSQFYNQRVKHLCYYHRMKPYLCYQLEQFNGQAPLKGCLLSEKGKQHAEILFLDKIRSMELSQVTITCYLTWSPCPNCAWQLAAFKRDRPDLILHIYTSRLYFHWKRPFQKGLCSLWQSGILVDVMDLPQFTDCWTNFVNPKRPFWPWKGLEIISRRTQRRLRRIKESWGLQDLVNDFGNLQLGPPMS

SEQ ID NO: 29 - protein, 429 aa, Mus musculus
  REGION 1..429: note = MISC_FEATURE - APOBEC-3-(2) (Mouse APOBEC-3) polypeptide sequence
  REGION 71..108: note = MISC_FEATURE - Nucleic acid editing domain
  REGION 288..319: note = MISC_FEATURE - Nucleic acid editing domain
MGPFCLGCSHRKCYSPIRNLISQETFKFHFKNLGYAKGRKDTFLCYEVTRKDCDSPVSLHHGVFKNKDNIHAEICFLYWFHDKVLKVLSPREEFKITWYMSWSPCFECAEQIVRFLATHHNLSLDIFSSRLYNVQDPETQQNLCRLVQEGAQVAAMDLYEFKKCWKKFVDNGGRRFRPWKRLLTNFRYQDSKLQEILRPCYIPVPSSSSSTLSNICLTKGLPETRFCVEGRRMDPLSEEEFYSQFYNQRVKHLCYYHRMKPYLCYQLEQFNGQAPLKGCLLSEKGKQHAEILFLDKIRSMELSQVTITCYLTWSPCPNCAWQLAAFKRDRPDLILHIYTSRLYFHWKRPFQKGLCSLWQSGILVDVMDLPQFTDCWTNFVNPKRPFWPWKGLEIISRRTQRRLRRIKESWGLQDLVNDFGNLQLGPPMS

SEQ ID NO: 30 - protein, 430 aa, Rattus sp.
  REGION 1..430: note = MISC_FEATURE - APOBEC-3 polypeptide sequence
  REGION 72..109: note = MISC_FEATURE - Nucleic acid editing domain
  REGION 289..320: note = MISC_FEATURE - Nucleic acid editing domain
MGPFCLGCSHRKCYSPIRNLISQETFKFHFKNRLRYAIDRKDTFLCYEVTRKDCDSPVSLHHGVFKNKDNIHAEICFLYWFHDKVLKVLSPREEFKITWYMSWSPCFECAEQVLRFLATHHNLSLDIFSSRLYNIRDPENQQNLCRLVQEGAQVAAMDLYEFKKCWKKFVDNGGRRFRPWKKLLTNFRYQDSKLQEILRPCYIPVPSSSSSTLSNICLTKGLPETRFCVERRRVHLLSEEEFYSQFYNQRVKHLCYYHGVKPYLCYQLEQFNGQAPLKGCLLSEKGKQHAEILFLDKIRSMELSQVIITCYLTWSPCPNCAWQLAAFKRDRPDLILHIYTSRLYFHWKRPFQKGLCSLWQSGILVDVMDLPQFTDCWTNFVNPKRPFWPWKGLEIISRRTQRRLHRIKESWGLQDLVNDFGNLQLGPPMS

SEQ ID NO: 31 - protein, 199 aa, Homo sapiens
  REGION 1..199: note = MISC_FEATURE - hAPOBEC-3A polypeptide sequence
  REGION 70..106: note = MISC_FEATURE - Nucleic acid editing domain
MEASPASGPRHLMDPHIFTSNFNNGIGRHKTYLCYEVERLDNGTSVKMDQHRGFLHNQAKNLLCGFYGRHAELRFLDLVPSLQLDPAQIYRVTWFISWSPCFSWGCAGEVRAFLQENTHVRLRIFAARIYDYDPLYKEALQMLRDAGAQVSIMTYDEFKHCWDTFVDHQGCPFQPWDGLDEHSQALSGRLRAILQNQGN

SEQ ID NO: 32 - protein, 373 aa, Homo sapiens
  REGION 1..373: note = MISC_FEATURE - hAPOBEC-3F polypeptide sequence
  REGION 65..99: note = MISC_FEATURE - Nucleic acid editing domain
  REGION 248..283: note = MISC_FEATURE - Nucleic acid editing domain
MKPHFRNTVERMYRDTFSYNFYNRPILSRRNTVWLCYEVKTKGPSRPRLDAKIFRGQVYSQPEHHAEMCFLSWFCGNQLPAYKCFQITWFVSWTPCPDCVAKLAEFLAEHPNVTLTISAARLYYYWERDYRRALCRLSQAGARVKIMDDEEFAYCWENFVYSEGQPFMPWYKFDDNYAFLHRTLKEILRNPMEAMYPHIFYFHFKNLRKAYGRNESWLCFTMEVVKHHSPVSWKRGVFRNQVDPETHCHAERCFLSWFCDDILSPNTNYEVTWYTSWSPCPECAGEVAEFLARHSNVNLTIFTARLYYFWDTDYQEGLRSLSQEGASVEIMGYKDFKYCWENFVYNDDEPFKPWKGLKYNFLFLDSKLQEILE

SEQ ID NO: 33 - protein, 370 aa, Macaca mulatta
  REGION 1..370: note = MISC_FEATURE - Rhesus macaque APOBEC-3G polypeptide sequence
  REGION 1..61: note = MISC_FEATURE - Cytoplasmic localization signal
MVEPMDPRTFVSNFNNRPILSGLNTVWLCCEVKTKDPSGPPLDAKIFQGKVYSKAKYHPEMRFLRWFHKWRQLHHDQEYKVTWYVSWSPCTRCANSVATFLAKDPKVTLTIFVARLYYFWKPDYQQALRILCQKRGGPHATMKIMNYNEFQDCWNKFVDGRGKPFKPRNNLPKHYTLLQATLGELLRHLMDPGTFTSNFNNKPWVSGQHETYLCYKVERLHNDTWVPLNQHRGFLRNQAPNIHGFPKGRHAELCFLDLIPFWKLDGQQYRVTCFTSWSPCFSCAQEMAKFISNNEHVSLCIFAARIYDDQGRYQEGLRALHRDGAKIAMMNYSEFEYCWDTFVDRQGRPFQPWDGLDEHSQALSGRLRAI

SEQ ID NO: 34 - protein, 384 aa, Pan troglodytes
  REGION 1..384: note = MISC_FEATURE - Chimpanzee APOBEC-3G polypeptide sequence
  REGION 1..60: note = MISC_FEATURE - Cytoplasmic localization signal
  REGION 65..100: note = MISC_FEATURE - Nucleic acid editing domain
  REGION 257..291: note = MISC_FEATURE - Nucleic acid editing domain
MKPHFRNPVERMYQDTFSDNFYNRPILSHRNTVWLCYEVKTKGPSRPPLDAKIFRGQVYSKLKYHPEMRFFHWFSKWRKLHRDQEYEVTWYISWSPCTKCTRDVATFLAEDPKVTLTIFVARLYYFWDPDYQEALRSLCQKRDGPRATMKIMNYDEFQHCWSKFVYSQRELFEPWNNLPKYYILLHIMLGEILRHSMDPPTFTSNFNNELWVRGRHETYLCYEVERLHNDTWVLLNQRRGFLCNQAPHKHGFLEGRHAELCFLDVIPFWKLDLHQDYRVTCFTSWSPCFSCAQEMAKFISNNKHVSLCIFAARIYDDQGRCQEGLRTLAKAGAKISIMTYSEFKHCWDTFVDHQGCPFQPWDGLEEHSQALSGRLRAILQNQGN

SEQ ID NO: 35 - protein, 377 aa, Chlorocebus sabaeus
  REGION 1..377: note = MISC_FEATURE - Green monkey APOBEC-3G polypeptide sequence
  REGION 1..60: note = MISC_FEATURE - Cytoplasmic localization signal
  REGION 65..100: note = MISC_FEATURE - Nucleic acid editing domain
  REGION 257..290: note = MISC_FEATURE - Nucleic acid editing domain
MNPQIRNMVEQMEPDIFVYYFNNRPILSGRNTVWLCYEVKTKDPSGPPLDANIFQGKLYPEAKDHPEMKFLHWFRKWRQLHRDQEYEVTWYVSWSPCTRCANSVATFLAEDPKVTLTIFVARLYYFWKPDYQQALRILCQERGGPHATMKIMNYNEFQHCWNEFVDGQGKPFKPRKNLPKHYTLLHATLGELLRHVMDPGTFTSNFNNKPWVSGQRETYLCYKVERSHNDTWVLLNQHRGFLRNQAPDRHGFPKGRHAELCFLDLIPFWKLDDQQYRVTCFTSWSPCFSCAQKMAKFISNNKHVSLCIFAARIYDDQGRCQEGLRTLHRDGAKIAVMNYSEFEYCWDTFVDRQGRPFQPWDGLDEHSQALSGRLRAI

SEQ ID NO: 36 - protein, 384 aa, Homo sapiens
  REGION 1..384: note = MISC_FEATURE - Human APOBEC-3G polypeptide sequence
  REGION 1..60: note = MISC_FEATURE - Cytoplasmic localization signal
  REGION 65..100: note = MISC_FEATURE - Nucleic acid editing domain
  REGION 257..291: note = MISC_FEATURE - Nucleic acid editing domain
MKPHFRNTVERMYRDTFSYNFYNRPILSRRNTVWLCYEVKTKGPSRPPLDAKIFRGQVYSELKYHPEMRFFHWFSKWRKLHRDQEYEVTWYISWSPCTKCTRDMATFLAEDPKVTLTIFVARLYYFWDPDYQEALRSLCQKRDGPRATMKIMNYDEFQHCWSKFVYSQRELFEPWNNLPKYYILLHIMLGEILRHSMDPPTFTFNFNNEPWVRGRHETYLCYEVERMHNDTWVLLNQRRGFLCNQAPHKHGFLEGRHAELCFLDVIPFWKLDLDQDYRVTCFTSWSPCFSCAQEMAKFISKNKHVSLCIFTARIYDDQGRCQEGLRTLAEAGAKISIMTYSEFKHCWDTFVDHQGCPFQPWDGLDEHSQDLSGRLRAILQNQEN

SEQ ID NO: 37 - protein, 382 aa, Homo sapiens
  REGION 1..382: note = MISC_FEATURE - Human APOBEC-3B polypeptide sequence
  REGION 66..100: note = MISC_FEATURE - Nucleic acid editing domain
  REGION 251..289: note = MISC_FEATURE - Nucleic acid editing domain
MNPQIRNPMERMYRDTFYDNFENEPILYGRSYTWLCYEVKIKRGRSNLLWDTGVFRGQVYFKPQYHAEMCFLSWFCGNQLPAYKCFQITWFVSWTPCPDCVAKLAEFLSEHPNVTLTISAARLYYYWERDYRRALCRLSQAGARVTIMDYEEFAYCWENFVYNEGQQFMPWYKFDENYAFLHRTLKEILRYLMDPDTFTFNFNNDPLVLRRRQTYLCYEVERLDNGTWVLMDQHMGFLCNEAKNLLCGFYGRHAELRFLDLVPSLQLDPAQIYRVTWFISWSPCFSWGCAGEVRAFLQENTHVRLRIFAARIYDYDPLYKEALQMLRDAGAQVSIMTYDEFEYCWDTFVYRQGCPFQPWDGLEEHSQALSGRLRAILQNQGN

SEQ ID NO: 38 - protein, 395 aa, Rattus sp.
  REGION 1..395: note = MISC_FEATURE - Rat APOBEC-3B polypeptide sequence
MQPQGLGPNAGMGPVCLGCSHRRPYSPIRNPLKKLYQQTFYFHFKNVRYAWGRKNNFLCYEVNGMDCALPVPLRQGVFRKQGHIHAELCFIYWFHDKVLRVLSPMEEFKVTWYMSWSPCSKCAEQVARFLAAHRNLSLAIFSSRLYYYLRNPNYQQKLCRLIQEGVHVAAMDLPEFKKCWNKFVDNDGQPFRPWMRLRINFSFYDCKLQEIFSRMNLLREDVFYLQFNNSHRVKPVQNRYYRRKSYLCYQLERANGQEPLKGYLLYKKGEQHVEILFLEKMRSMELSQVRITCYLTWSPCPNCARQLAAFKKDHPDLILRIYTSRLYFWRKKFQKGLCTLWRSGIHVDVMDLPQFADCWTNFVNPQRPFRPWNELEKNSWRIQRRLRRIKESWGL

SEQ ID NO: 39 - protein, 226 aa, Bos taurus
  REGION 1..226: note = MISC_FEATURE - Bovine APOBEC-3B polypeptide sequence
DGWEVAFRSGTVLKAGVLGVSMTEGWAGSGHPGQGACVWTPGTRNTMNLLREVLFKQQFGNQPRVPAPYYRRKTYLCYQLKQRNDLTLDRGCFRNKKQRHAERFIDKINSLDLNPSQSYKIICYITWSPCPNCANELVNFITRNNHLKLEIFASRLYFHWIKSFKMGLQDLQNAGISVAVMTHTEFEDCWEQFVDNQSRPFQPWDKLEQYSASIRRRLQRILTAPI

SEQ ID NO: 40 - protein, 490 aa, Pan troglodytes
  REGION 1..490: note = MISC_FEATURE - Chimpanzee APOBEC-3B polypeptide sequence
MNPQIRNPMEWMYQRTFYYNFENEPILYGRSYTWLCYEVKIRRGHSNLLWDTGVFRGQMYSQPEHHAEMCFLSWFCGNQLSAYKCFQITWFVSWTPCPDCVAKLAKFLAEHPNVTLTISAARLYYYWERDYRRALCRLSQAGARVKIMDDEEFAYCWENFVYNEGQPFMPWYKFDDNYAFLHRTLKEIIRHLMDPDTFTFNFNNDPLVLRRHQTYLCYEVERLDNGTWVLMDQHMGFLCNEAKNLLCGFYGRHAELRFLDLVPSLQLDPAQIYRVTWFISWSPCFSWGCAGQVRAFLQENTHVRLRIFAARIYDYDPLYKEALQMLRDAGAQVSIMTYDEFEYCWDTFVYRQGCPFQPWDGLEEHSQALSGRLRAILQVRASSLCMVPHRPPPPPQSPGPCLPLCSEPPLGSLLPTGRPAPSLPFLLTASFSFPPPASLPPLPSLSLSPGHLPVPSFHSLTSCSIQPPCSSRIRETEGWASVSKEGRDLG

SEQ ID NO: 41 - protein, 190 aa, Homo sapiens
  REGION 1..190: note = MISC_FEATURE - Human APOBEC-3C polypeptide sequence
  REGION 65..100: note = MISC_FEATURE - Nucleic acid editing domain
MNPQIRNPMKAMYPGTFYFQFKNLWEANDRNETWLCFTVEGIKRRSVVSWKTGVFRNQVDSETHCHAERCFLSWFCDDILSPNTKYQVTWYTSWSPCPDCAGEVAEFLARHSNVNLTIFTARLYYFQYPCYQEGLRSLSQEGVAVEIMDYEDFKYCWENFVYNDNEPFKPWKGLKTNFRLLKRRLRESLQ

SEQ ID NO: 42 - protein, 190 aa, Gorilla sp.
  REGION 1..190: note = MISC_FEATURE - Gorilla APOBEC-3C polypeptide sequence
  REGION 65..100: note = MISC_FEATURE - Nucleic acid editing domain
MNPQIRNPMKAMYPGTFYFQFKNLWEANDRNETWLCFTVEGIKRRSVVSWKTGVFRNQVDSETHCHAERCFLSWECDDILSPNTNYQVTWYTSWSPCPECAGEVAEFLARHSNVNLTIFTARLYYFQDTDYQEGLRSLSQEGVAVKIMDYKDFKYCWENFVYNDDEPFKPWKGLKYNFRFLKRRLQEILE

SEQ ID NO: 43 - protein, 202 aa, Macaca mulatta
  REGION 1..202: note = MISC_FEATURE - Rhesus macaque APOBEC-3A polypeptide sequence
  REGION 72..103: note = MISC_FEATURE - Nucleic acid editing domain
MDGSPASRPRHLMDPNTFTFNFNNDLSVRGRHQTYLCYEVERLDNGTWVPMDERRGFLCNKAKNVPCGDYGCHVELRFLCEVPSWQLDPAQTYRVTWFISWSPCFRRGCAGQVRVFLQENKHVRLRIFAARIYDYDPLYQEALRTLRDAGAQVSIMTYEEFKHCWDTFVDRQGRPFQPWDGLDEHSQALSGRLRAILQNQGN

SEQ ID NO: 44 - protein, 185 aa, Bos taurus
  REGION 1..185: note = MISC_FEATURE - Bovine APOBEC-3A polypeptide sequence
  REGION 56..86: note = MISC_FEATURE - Nucleic acid editing domain
MDEYTFTENFNNQGWPSKTYLCYEMERLDGDATIPLDEYKGFVRNKGLDQPEKPCHAELYFLGKIHSWNLDRNQHYRLTCFISWSPCYDCAQKLTTFLKENHHISLHILASRIYTHNRFGCHQSGLCELQAAGARITIMTFEDFKHCWETFVDHKGKPFQPWEGLNVKSQALCTELQAILKTQQN

SEQ ID NO: 45 - protein, 200 aa, Homo sapiens
  REGION 1..200: note = MISC_FEATURE - Human APOBEC-3H polypeptide sequence
  REGION 54..88: note = MISC_FEATURE - Nucleic acid editing domain
MALLTAETFRLQFNNKRRLRRPYYPRKALLCYQLTPQNGSTPTRGYFENKKKCHAEICFINEIKSMGLDETQCYQVTCYLTWSPCSSCAWELVDFIKAHDHLNLGIFASRLYYHWCKPQQKGLRLLCGSQVPVEVMGFPKFADCWENFVDHEKPLSFNPYKMLEELDKNSRAIKRRLERIKIPGVRAQGRYMDILCDAEV

SEQ ID NO: 46 - protein, 210 aa, Macaca mulatta
  REGION 1..210: note = MISC_FEATURE - Rhesus macaque APOBEC-3H polypeptide sequence
MALLTAKTFSLQFNNKRRVNKPYYPRKALLCYQLTPQNGSTPTRGHLKNKKKDHAEIRFINKIKSMGLDETQCYQVTCYLTWSPCPSCAGELVDFIKAHRHLNLRIFASRLYYHWRPNYQEGLLLLCGSQVPVEVMGLPEFTDCWENFVDHKEPPSFNPSEKLEELDKNSQAIKRRLERIKSRSVDVLENGLRSLQLGPVTPSSSIRNSR

SEQ ID NO: 47 - protein, 386 aa, Homo sapiens
  REGION 1..386: note = MISC_FEATURE - Human APOBEC-3D polypeptide sequence
  REGION 78..109: note = MISC_FEATURE - Nucleic acid editing domain
  REGION 262..296: note = MISC_FEATURE - Nucleic acid editing domain
MNPQIRNPMERMYRDTFYDNFENEPILYGRSYTWLCYEVKIKRGRSNLLWDTGVFRGPVLPKRQSNHRQEVYFRFENHAEMCFLSWFCGNRLPANRRFQITWFVSWNPCLPCVVKVTKFLAEHPNVTLTISAARLYYYRDRDWRWVLLRLHKAGARVKIMDYEDFAYCWENFVCNEGQPFMPWYKFDDNYASLHRTLKEILRNPMEAMYPHIFYFHFKNLLKACGRNESWLCFTMEVTKHHSAVFRKRGVFRNQVDPETHCHAERCFLSWFCDDILSPNTNYEVTWYTSWSPCPECAGEVAEFLARHSNVNLTIFTARLCYFWDTDYQEGLCSLSQEGASVKIMGYKDFVSCWKNFVYSDDEPFKPWKGLQTNFRLLKRRLREILQ

SEQ ID NO: 48 - protein, 236 aa, Homo sapiens
  REGION 1..236: note = MISC_FEATURE - Human APOBEC-1 polypeptide sequence
MTSEKGPSTGDPTLRRRIEPWEFDVFYDPRELRKEACLLYEIKWGMSRKIWRSSGKNTTNHVEVNFIKKFTSERDFHPSMSCSITWFLSWSPCWECSQAIREFLSRHPGVTLVIYVARLFWHMDQQNRQGLRDLVNSGVTIQIMRASEYYHCWRNFVNYPPGDEAHWPQYPPLWMMLYALELHCIILSLPPCLKISRRWQNHLTFFRLHLQNCHYQTIPPHILLATGLIHPSVAWR

SEQ ID NO: 49 - protein, 229 aa, Mus musculus
  REGION 1..229: note = MISC_FEATURE - Mouse APOBEC-1 polypeptide sequence
MSSETGPVAVDPTLRRRIEPHEFEVFFDPRELRKETCLLYEINWGGRHSVWRHTSQNTSNHVEVNFLEKFTTERYFRPNTRCSITWFLSWSPCGECSRAITEFLSRHPYVTLFIYIARLYHHTDQRNRQGLRDLISSGVTIQIMTEQEYCYCWRNFVNYPPSNEAYWPRYPHLWVKLYVLELYCIILGLPPCLKILRRKQPQLTFFTITLQTCHYQRIPPHLLWATGLK

SEQ ID NO: 50 - protein, 224 aa, Homo sapiens
  REGION 1..224: note = MISC_FEATURE - Human APOBEC-2 polypeptide sequence
MAQKEEAAVATEAASQNGEDLENLDDPEKLKELIELPPFEIVTGERLPANFFKFQFRNVEYSSGRNKTFLCYVVEAQGKGGQVQASRGYLEDEHAAAHAEEAFFNTILPAFDPALRYNVTWYVSSSPCAACADRIIKTLSKTKNLRLLILVGRLFMWEEPEIQAALKKLKEAGCKLRIMKPQDFEYVWQNFVEQEEGESKAFQPWEDIQENFLYYEEKLADILK

SEQ ID NO: 51 - protein, 224 aa, Mus musculus
  REGION 1..224: note = MISC_FEATURE - Mouse APOBEC-2 polypeptide sequence
MAQKEEAAEAAAPASQNGDDLENLEDPEKLKELIDLPPFEIVTGVRLPVNFFKFQFRNVEYSSGRNKTFLCYVVEVQSKGGQAQATQGYLEDEHAGAHAEEAFFNTILPAFDPALKYNVTWYVSSSPCAACADRILKTLSKTKNLRLLILVSRLFMWEEPEVQAALKKLKEAGCKLRIMKPQDFEYIWQNFVEQEEGESKAFEPWEDIQENFLYYEEKLADILK

SEQ ID NO: 52 - protein, 224 aa, Rattus sp.
  REGION 1..224: note = MISC_FEATURE - Rat APOBEC-2 polypeptide sequence
MAQKEEAAEAAAPASQNGDDLENLEDPEKLKELIDLPPFEIVTGVRLPVNFFKFQFRNVEYSSGRNKTFLCYVVEAQSKGGQVQATQGYLEDEHAGAHAEEAFFNTILPAFDPALKYNVTWYVSSSPCAACADRILKTLSKTKNLRLLILVSRLFMWEEPEVQAALKKLKEAGCKLRIMKPQDFEYLWQNFVEQEEGESKAFEPWEDIQENFLYYEEKLADILK

SEQ ID NO: 53 - protein, 208 aa, Petromyzon marinus
  REGION 1..208: note = MISC_FEATURE - Petromyzon marinus CDA1 (pmCDAl) polypeptide sequence
MTDAEYVRIHEKLDIYTFKKQFFNNKKSVSHRCYVLFELKRRGERRACFWGYAVNKPQSGTERGIHAEIFSIRKVEEYLRDNPGQFTINWYSSWSPCADCAEKILEWYNQELRGNGHTLKIWACKLYYEKNARNQIGLWNLRDNGVGLNVMVSEHYQCCRKIFIQSSHNQLNENRWLEKTLKRAEKRRSELSFMIQVKILHTTKSPAV

SEQ ID NO: 54 - protein, 381 aa, Homo sapiens
  REGION 1..381: note = MISC_FEATURE - Human APOBEC3G D316R D317R polypeptide sequence
MKPHFRNTVERMYRDTFSYNFYNRPILSRRNTVWLCYEVKTKGPSRPPLDAKIFRGQVYSELKYHPEMRFFHWFSKWRKLHRDQEYEVTWYISWSPCTKCTRDMATFLAEDPKVTLTIFVARLYYFWDPDYQEALRSLCQKRDGPRATMKFNYDEFQHCWSKFVYSQRELFEPWNNLPKYYILLHFMLGEILRHSMDPPTFTFNFNNEPWVRGRHETYLCYEVERMHNDTWVLLNQRRGFLCNQAPHKHGFLEGRHAELCFLDVIPFWKLDLDQDYRVTCFTSWSPCFSCAQEMAKFISKKHVSLCIFTARIYRRQGRCQEGLRTLAEAGAKISFTYSEFKHCWDTFVDHQGCPFQPWDGLDEHSQDLSGRLRAILQNQEN

SEQ ID NO: 55 - protein, 182 aa, Homo sapiens
  REGION 1..182: note = MISC_FEATURE - Human APOBEC3G chain A polypeptide sequence
MDPPTFTFNFNNEPWWGRHETYLCYEVERMHNDTWVLLNQRRGFLCNQAPHKHGFLEGRHAELCFLDVIPFWKLDLDQDYRVTCFTSWSPCFSCAQEMAKFISKNKHVSLCIFTARIYDDQGRCQEGLRTLAEAGAKISFTYSEFKHCWDTFVDHQGCPFQPWDGLDEHSQDLSGRLRAILQ

SEQ ID NO: 56 - protein, 184 aa, Homo sapiens
  REGION 1..184: note = MISC_FEATURE - Human APOBEC3G chain A D120R D121R polypeptide sequence
MDPPTFTFNFNNEPWVRGRHETYLCYEVERMHNDTWVLLNQRRGFLCNQAPHKHGFLEGRHAELCFLDVIPFWKLDLDQDYRVTCFTSWSPCFSCAQEMAKFISKNKHVSLCIFTARIYRRQGRCQEGLRTLAEAGAKISFMTYSEFKHCWDTFVDHQGCPFQPWDGLDEHSQDLSGRLRAILQ

SEQ ID NO: 57 - protein, 367 aa, Homo sapiens
  REGION 1..367: note = MISC_FEATURE - hAPOBEC-4 polypeptide sequence
MEPIYEEYLANHGTIVKPYYWLSFSLDCSNCPYHIRTGEEARVSLTEFCQIFGFPYGTTFPQTKHLTFYELKTSSGSLVQKGHASSCTGNYIHPESMLFEMNGYLDSAIYNNDSIRHIILYSNNSPCNEANHCCISKMYNFLITYPGITLSIYFSQLYHTEMDFPASAWNREALRSLASLWPRVVLSPISGGIWHSVLHSFISGVSGSHVFQPILTGRALADRHNAYEINAITGVKPYFTDVLLQTKRNPNTKAQEALESYPLNNAFPGQFFQMPSGQLQPNLPPDLRAPVVFVLVPLRDLPPMHMGQNPNKPRNIVRHLNMPQMSFQETKDLGRLPTGRSVEIVEITEQFASSKEADEKKKKKGKK

SEQ ID NO: 58 - protein, 388 aa, Rattus norvegicus
  REGION 1..388: note = MISC_FEATURE - rAPOBEC-4 polypeptide sequence
MEPLYEEYLTHSGTIVKPYYWLSVSLNCTNCPYHIRTGEEARVPYTEFHQTFGFPWSTYPQTKHLTFYELRSSSGNLIQKGLASNCTGSHTHPESMLFERDGYLDSLIFHDSNIRHIILYSNNSPCDEANHCCISKMYNFLMNYPEVTLSVFFSQLYHTENQFPTSAWNREALRGLASLWPQVTLSAISGGIWQSILETFVSGISEGLTAVRPFTAGRTLTDRYNAYEINCITEVKPYFTDALHSWQKENQDQKVWAASENQPLHNTTPAQWQPDMSQDCRTPAVFMLVPYRDLPPIHVNPSPQKPRTVVRHLNTLQLSASKVKALRKSPSGRPVKKEEARKGSTRSQEANETNKSKWKKQTLFIKSNICHLLEREQKKIGILSSWSV

SEQ ID NO: 59 - protein, 363 aa, Macaca fascicularis
  REGION 1..363: note = MISC_FEATURE - mfAPOBEC-4 polypeptide sequence
MEPTYEEYLANHGTIVKPYYWLSFSLDCSNCPYHIRTGEEARVSLTEFCQIFGFPYGTTYPQTKHLTFYELKTSSGSLVQKGHASSCTGNYIHPESMLFEMNGYLDSAIYNNDSIRHIILYCNNSPCNEANHCCISKVYNFLITYPGITLSIYFSQLYHTEMDFPASAWNREALRSLASLWPRVVLSPISGGIWHSVLHSFVSGVSGSHVFQPILTGRALTDRYNAYEINAITGVKPFFTDVLLHTKRNPNTKAQMALESYPLNNAFPGQSFQMTSGIPPDLRAPVVFVLLPLRDLPPMHMGQDPNKPRNIIRHLNMPQMSFQETKDLERLPTRRSVETVEITERFASSKQAEEKTKKKKGKK

SEQ ID NO: 60 - protein, 218 aa, Rattus norvegicus
  REGION 1..218: note = MISC_FEATURE - rAPOBEC-1 (delta 177-186) polypeptide sequence
MSSETGPVAVDPTLRRRIEPHEFEVFFDPRELRKETCLLYEINWGGRHSIWRHTSQNTNKHVEVNFIEKFTTERYFCPNTRCSITWFLSWSPCGECSRAITEFLSRYPHVTLFIYIARLYHHADPRNRQGLRDLISSGVTIQIMTEQESGYCWRNFVNYSPSNEAHWPRYPHLWVRGLPPCLNILRRKQPQLTFFTIALQSCHYQRLPPHILWATGLK

SEQ ID NO: 61 - protein, 218 aa, Rattus norvegicus
  REGION 1..218: note = MISC_FEATURE - rAPOBEC-1 (delta 202-213) polypeptide sequence
MSSETGPVAVDPTLRRRIEPHEFEVFFDPRELRKETCLLYEINWGGRHSIWRHTSQNTNKHVEVNFIEKFTTERYFCPNTRCSITWFLSWSPCGECSRAITEFLSRYPHVTLFIYIARLYHHADPRNRQGLRDLISSGVTIQIMTEQESGYCWRNFVNYSPSNEAHWPRYPHLWVRLYVLELYCIILGLPPCLNILRRKQPQHYQRLPPHILWATGLK

SEQ ID NO: 62 - protein, 198 aa, Mus musculus
  REGION 1..198: note = MISC_FEATURE - mouse cytidine deaminase polypeptide sequence
  REGION 1..30: note = MISC_FEATURE - Nuclear localization sequence
  REGION 183..198: note = MISC_FEATURE - Nuclear export signal
MDSLLMKQKKFLYHFKNVRWAKGRHETYLCYVVKRRDSATSCSLDFGHLRNKSGCHVELLFLRYISDWDLDPGRCYRVTWFTSWSPCYDCARHVAEFLRWNPNLSLRIFTARLYFCEDRKAEPEGLRRLHRAGVQIGIMTFKDYFYCWNTFVENRERTFKAWEGLHENSVRLTRQLRRILLPLYEVDDLRDAFRMLGF

SEQ ID NO: 63 - protein, 224 aa, Petromyzon marinus
  REGION 1..224: note = MISC_FEATURE - pmCDA-1 polypeptide sequence
MAGYECVRVSEKLDFDTFEFQFENLHYATERHRTYVIFDVKPQSAGGRSRRLWGYIINNPNVCHAELILMSMIDRHLESNPGVYAMTWYMSWSPCANCSSKLNPWLKNLLEEQGHTLTMHFSRIYDRDREGDHRGLRGLKHVSNSFRMGVVGRAEVKECLAEYVEASRRTLTWLDTTESMAAKMRRKLFCILVRCAGMRESGIPLHLFTLQTPLLSGRVVWWRV

SEQ ID NO: 64 - protein, 331 aa, Petromyzon marinus
  REGION 1..331: note = MISC_FEATURE - pmCDA-2 polypeptide sequence
MELREVVDCALASCVRHEPLSRVAFLRCFAAPSQKPRGTVILFYVEGAGRGVTGGHAVNYNKQGTSIHAEVLLLSAVRAALLRRRRCEDGEEATRGCTLHCYSTYSPCRDCVEYIQEFGASTGVRVVIHCCRLYELDVNRRRSEAEGVLRSLSRLGRDFRLMGPRDAIALLLGGRLANTADGESGASGNAWVTETNVVEPLVDMTGFGDEDLHAQVQRNKQIREAYANYASAVSLMLGELHVDPDKFPFLAEFLAQTSVEPSGTPRETRGRPRGASSRGPEIGRQRPADFERALGAYGLFLHPRIVSREADREEIKRDLIVVMRKHNYQGP

SEQ ID NO: 65 - protein, 209 aa, Petromyzon marinus
  REGION 1..209: note = MISC_FEATURE - pmCDA-5 polypeptide sequence
MAGDENVRVSEKLDFDTFEFQFENLHYATERHRTYVIFDVKPQSAGGRSRRLWGYIINNPNVCHAELILMSMIDRHLESNPGVYAMTWYMSWSPCANCSSKLNPWLKNLLEEQGHTLMMHFSRIYDRDREGDHRGLRGLKHVSNSFRMGVVGRAEVKECLAEYVEASRRTLTWLDTTESMAAKMRRKLFCILVRCAGMRESGMPLHLFT

SEQ ID NO: 66 - protein, 158 aa, Saccharomyces cerevisiae
  REGION 1..158: note = MISC_FEATURE - yCD polypeptide sequence
MVTGGMASKWDQKGMDIAYEEAALGYKEGGVPIGGCLINNKDGSVLGRGHNMRFQKGSATLHGEISTLENCGRLEGKVYKDTTLYTTLSPCDMCTGAIIMYGIPRCVVGENVNFKSKGEKYLQTRGHEVVVVDDERCKKIMKQFIDERPQDWFEDIGE

SEQ ID NO: 67 - protein, 194 aa, synthetic construct
  REGION 1..194: note = cytidine deaminase polypeptide sequence
MKPQIRDHRPNPMEAMYPHIFYFHFENLEKAYGRNETWLCFTVEIIKQYLPVPWKKGVFRNQVDPETHCHAEKCFLSWFCNNTLSPKKNYQVTWYTSWSPCPECAGEVAEFLAEHSNVKLTIYTARLYYFWDTDYQEGLRSLSEEGASVEIMDYEDFQYCWENFVYDDGEPFKRWKGLKYNFQSLTRRLREILQ

SEQ ID NO: 68 - protein, 192 aa, synthetic construct
  REGION 1..192: note = cytidine deaminase polypeptide sequence
MADSSEKMRGQYISRDTFEKNYKPIDGTKEAHLLCEIKWGKYGKPWLHWCQNQRMNIHAEDYFMNNIFKAKKHPVHCYVTWYLSWSPCADCASKIVKFLEERPYLKLTIYVAQLYYHTEEENRKGLRLLRSKKVIIRVMDISDYNYCWKVFVSNQNGNEDYWPLQFDPWVKENYSRLLDIFWESKCRSPNPW

SEQ ID NO: 69 - protein, 280 aa, synthetic construct
  REGION 1..280: note = cytidine deaminase polypeptide sequence
MDPQRLRQWPGPGPASRGGYGQRPRIRNPEEWFHELSPRTFSFHFRNLRFASGRNRSYICCQVEGKNCFFQGIFQNQVPPDPPCHAELCFLSWFQSWGLSPDEHYYVTWFISWSPCCECAAKVAQFLEENRNVSLSLSAARLYYFWKSESREGLRRLSDLGAQVGIMSFQDFQHCWNNFVHNLGMPFQPWKKLHKNYQRLVTELKQILREEPATYGSPQAQGKVRIGSTAAGLRHSHSHTRSEAHLRPNHSSRQHRILNPPREARARTCVLVDASWICYR

SEQ ID NO: 70 - protein, 555 aa, synthetic construct
  REGION 1..555: note = pYY-BEM3.1; tr|F7B644|F7B644_HORSE polypeptide sequence
MPRGRARERQRRNPMEKLDAEAFSFHFLNMEFVYDRNCSYLCYQVEGRLSGSPVLSEQGVFPNEVCGKTRRHAELCFLDWFRGRLSPDEYYCVTWFISWSPCSNCAREVAEFLKRHRNVELSIFAARLYYCRDHEQGLQSLCNRGAQLAVMLRKDFTYCWDNFVHNSGREFSPWENIDANSDLLARKLEDLLKNPMEKLHRKTFSFHFRNLKFAKGRKCSYLCYRVEGRLSGSPGLSEQGVFLNEVCDENCRHAELCFLHWFRGRLSPHADYRVTWFISWSPCSNCAREVAEFLKQHRNVELHISAARLYYWQRNKPGLRNLRSSGAQLAIMFFWDFRDCWDNFVHNSGRHFIPWKKINVNSRLLATKLEDLLKNPLEKLHPNTFSFHFCNLEFAYDRKYSYLCYQVEGRLSGSPGLSEQGVFLNEVCGKTRCHAELCFLDWFRVRLSPDEYYRVTWFISWSPCFYCAREVADFLKQYRNVKLSIFAARLYYCRDHAQGLRSLCSSGAQLAIMFFWDFRYCWDNFVHNSGREFRPWKKINVNSRLLATKLEDILK

SEQ ID NO: 71 - protein, 437 aa, synthetic construct
  REGION 1..437: note = pYY-BEM3.2; tr|D1LZA1|D1LZA1_PANTI polypeptide sequence
MEPWRPSPRNPMDRIDPKTFRFQFPNLRYASGRKLCYLCFQVERDYFYYNDSDWGVFRNEVHPWAPCHAEQCFLSWFRDQYPYRDEDYNVTWFLSWSPCPTCAEEVVEFLEEYRNLTLSIFTSRLYYFWHPNYQEGLCKLWDAGVQLDIMSCDEFEYCWDNFVYHKGMRFQRRNLLKDYDFLAAKLQEILSPGQQRKRDWPFPPRPGAQVDPRSWVQEVTEPGINTRRHPLHLLVSFLLPRPTMNPLQEDIFYRQFGNQHRVPKPYYYRRKTYLCYQLKLPEGTLIDKDCLRNKKKRHAEICFIDKIKSLTRDTSQRFEIICYITWSPCPFCAEELVAFVKDNPHLSLRIFASRLYVHWRWKYQQGLRHLHASGIPVAVMSLPEFEDCWRNFVDHQDRLFQPWRNLDQYSESIKRRLGKILTPLNDLRNDFRNLKLE

SEQ ID NO: 72 - protein, 440 aa, synthetic construct
  REGION 1..440: note = pYY-BEM3.3; tr|A0A3Q0DM17|A0A3Q0DM17_TARSY polypeptide sequence
MPMKRMYSNIYFDHFNNQRLLSGQNAPWLCFKVERVENCMLVPLETGVFGNQVSGCCGKTERPVEPTSLTRSVLVSPNPGTELRAQQPSRKGHLGKLGCVEYPSPGLALVMLGYGASTYCPDSSMYCPETCHHPEMCFLYWFEKTLSHEEQYQITWYVSWSPCVNCAEEVAEFLSVHPKVNLTIYAARLYCYQKLNHRQGLRRLCKEGACVKIMNYEEFDHCWENFVYNNYKSFKPWVKLQDNYELLATELDKILRIPMERMPQKKFRFHFQNLIAKDRNTTWLCFEVKNVRKKHPPDLLERGIFQNQVTPRINCHAEMCFLSWFLENMLLHGKRYQVTWYISWSPCSICAEEVAEFLSAHPKVSLTIYAARLYYFWVPGYRQGLRRLVEEGARVEIMNYEEFDYCWENFVSINNEPFQPWEGLHEKYGYLVTKLNNILG

SEQ ID NO: 73 - protein, 453 aa, synthetic construct
  REGION 1..453: note = pYY-BEM3.4; tr|A0A3Q0DNJ5|A0A3Q0DNJ5_TARSY polypeptide sequence
MEDNPEPRPRQQMDQDTFIFNFNNDPSVRGRHQTFLCYEVEHLDDDTWVPQDKYLGFLHNQPQSRSNAYCAYHAELCFLELVSSWQLDPAQRYRVTCFISWSPCSSCAQEVAAFLKKNRHVTLRILAARIYDYYQGYEDGLRTLQGVGVDITVMTSAEFGHCWNTFVDHQGSPFQPWEGLDQHSQVIWQRMQDILQVIPAKYLMEKVKYTVTVDILFKGRVPGPRYLMDQNTFTRNFINNLSVSGRRQTLLCYEVERLGGDIWVPLDQLRGFLLSQARDVLNYYQGRHAEPCFLDLVSSWQLDPAQHYRVTWFISWSPCTSCAQAVAAFLRENRHVTLRILAARIYDYHQGYEEGLRTLQRTGAHIDIMTFKEFGHCWNTFVNHKGSPFKSWTGLDQHSQALRKRLQDILHTMASSLWDQSEPKKPIPSQEVTLPESIPPSHGNRFRLVKRPS

SEQ ID NO: 74 - protein, 424 aa, synthetic construct
  REGION 1..424: note = pYY-BEM3.5; tr|G5AYU5|G5AYU5_HETGA polypeptide sequence
FCFLSCVHRKPIERIYKKAFRFYFRNLRCAYGRNKTFLCYEVKRERDNKVLHKGVVLNQVEPYMPLHAELRFLSWFHDTLLCPLGSYQVTLYVSWSPCSECAEELTTFLAGHRNVTMTIYVAQLYYCNWKSPNREGLKILIAEDARLRVMFYDEFLYCWRNFVKNDYNNFDPWSLLDENSRYHNRILQNILKGWGRPHRVGPEGEQTATPGGSGGHCISVFSLLRRREMTLKEETFRVQFNNAYKAPKPYRRRVTYLCYQLQEANGDPLTKGCLRTKKGYHAESRFIKRICSMDLGQDQSYQVTCFLTWSPCPHCAQELVSFKRAHPHLRLQIFTARLFFHWKRSYQEGLQRLCRAQVPVAVMGHPEFAYCWDNFVDHQPGPFEPPWAKLEYYSSCLKRRLQQILRSWGVDDLTNDFRNLQLGP

SEQ ID NO: 75 - protein, 385 aa, synthetic construct
  REGION 1..385: note = pYY-BEM3.6; tr|A0A2Y9QMV5|A0A2Y9QMV5_TRIMA polypeptide sequence
MLSSPQTPGTRKPMKTLAPDEFSFNFENLRLAHGRNTTFLCFQVETKAPPSLNSPDSGIFQNQDHCPSHHHAEMVFLTWFQKRLSPAQHYEVTWYMSWSPCSRCAVQVAKFLKSNSTVNLSIFVARLYYPRELETKDGLHSLWQAGAQVQIMFFQDFKYCWENFVNNEGKPFQPWKNLDENSKDWDTELKDIHRNTTDLLTEEMFYSQFYNREKKSSIPRKTYLCYQLNEPQPVKRCLHYKKGYHAVTRFIDGIVSMNLDPARSYDITCYFTWSPCNRYARKLVSFIEDYPNLRLKVYTSRLYFHWCWTNMQGLQHLQNSRVTVAVMTFRDFEYCWKNFVDNQGKPFEPWEKLDLYSQSTERRLRRILKPLTPDVLNEDFGNLHL

SEQ ID NO: 76 - protein, 381 aa, synthetic construct
  REGION 1..381: note = pYY-BEM3.7; tr|H0XHI0|H0XHI0_OTOGA polypeptide sequence
LSCAFRDPMNRMYPKTFCQNFEKEPCPSNQNSSWLCFEVETKNSAVFFHRGVFRNQPAPPPRAPTSVLLSQGPVKTPCHAEECFLTWIQGVLPPDHHYHVTWYVSRGPCANCANLIVHFLAMHRRVTLTIFAAHLNFFWESDFQQGLLRMDQEGVQLHIMGYEEFEYCWDNFVYNQRKQFVPWNGLNENYEFMVSTLEDILRSPLDRIRQKDFSIHFRNSLWLDDKSTWLCFEVKRTKSPVPLYRGVFRNQSPPKTPCHAEVRFFTWLQDLPPDFCCQFTWYLSWSPCADCADLVANFLAKHRNVSLTIFVARLYYYRDPEMHRGLRRMYQEGANVDIMSVIEFEYCWDNFVYNQGKQFVPWNGLNENYEFLVPRLQEILE

SEQ ID NO: 77 - protein, 337 aa, synthetic construct
  REGION 1..337: note = pYY-BEM3.8; tr|A0A3M0K4Y7|A0A3M0K4Y7_HIRRU polypeptide sequence
MYISKKALRRHFDPRVYPRETYLLCELQWEGSRRVWIHWIRNVPDHHAEEYFLEEVFEPRNYGFCNITLYLSWSPCCTCCSKIRDFLKRNPNVKIDIRVARLIYPDYAETRSSLRELNGLQRVSIQVMEAAGLSCIESKNHRISQVERDPKGSSSPTLFTLQDHLKLSNMTESVIQDSVSIQICYQMRILGFQCHIRWKLQPEDFQRNYSPNQIGRVVYLLYEVRWRRGSIWRNWCSNNPEQHAEVNFLENHFHHRPQTPCSITWFLSTSPCGKCSRRILEFLKSQPNVTLEIYAAKLFRHHDIRNRQGLRNLMMNGVTIYIMNLEGNPASLCLSVD

SEQ ID NO: 78 - protein, 237 aa, synthetic construct
  REGION 1..237: note = pYY-BEM3.9; tr|A0A3P4LUZ8|A0A3P4LUZ8_GULGU polypeptide sequence
MSFEDYEYCWETFVDHKGMYFQSWDLLRDNDLLAAELKNILRSTMNPLRQEIFYHQFGNQPRAPRPYHRRKTYLCYQLQPHEGPITARVCLQNKKKRHAEIRFIDNIRALRLDRSQTFEITCYLTWSPCPTCAKALAVFVQDHPHISLRLFASRLFIHWCWKYQEGLRLLHRSRIPVAVMRLQEFEDCWRNFVDNQDEPFQPWNKLEQYSESITRRLRRILGHPQNNLENDFRNLHI

SEQ ID NO: 79 - protein, 221 aa, synthetic construct
  REGION 1..221: note = pYY-BEM3.10; tr|G5BPM8|G5BPM8_HETGA polypeptide sequence
RRRIEPWQFEASFDPRQLRRETCLLSEVRWGTSPRAWRGCSLNTARHAEVSFMDRLTSEGRLRGPVRCSITWFLSWSPCGACAQAIGEFLRQHPNVSLVIYIARLFWHVDEQNRQGLRDLVTRGVRMQVMSDPEFAHCWRNFVNYSPGQEARWPQVPPVWTWLYSLELHCILLNLPPCLKISRRHHNQLTFFQLILQNCHYQAIPSPVLLASGLIHPFVTW

SEQ ID NO: 80 - protein, 211 aa, synthetic construct
  REGION 1..211: note = pYY-BEM3.11; tr|H2M862|H2M862_ORYLA polypeptide sequence
MITKLDSVLLPKKKFIYHYKNMRWARGRHETYLCFVVKRRVGPESLSFDFGHLRNRNGCHVELLFLRHLSALCPGLWGYGATGQGRVSYSITWFCSWSPCANCSFRLAQFLSQTPNLRLRIFVSRLYFCDLEDSREREGLRMLKKVGVHITVMSYKDYFYCWQTFVARKQSKFKPWDGLHQNSVRLSRKLNRILQPCETEDFRDAFKLLGL

SEQ ID NO: 81 - protein, 353 aa, synthetic construct
  REGION 1..353: note = pYY-BEM3.12; tr|H0Y0C6|H0Y0C6_OTOGA polypeptide sequence
MYLKTFYRHFNNRPYLSRRNDTWLCFEVKTTSSNSPGSFYSGVFRNQGPRYCPWHTELCFLTWVRPIVSHHHFYQITWYMSWSPCANCAWQVATFLATHENVSLTNYTVRIYYFWRQDYRQGLLRMIEEGTQVYVMSSKEFQHCWENFVDHWGTRWVTCWNRLKKNYEFLVTRLSEILSDPKERISPNTFYNQFNNTPVPRGRKDTWLCFEVKEKNSNSPGSFHRGVFQNQVFSGTSSHARRCPPDHHYEVTWYTSWSPCAHCAWHVVNFLTSNPNVSLTIFAARLYYIYRPEIQQGLRRVFQEGAKVHIMSLKEFKYCWAKLVYNSGMRFMPWYQFNFNFLFPNTTLKGDLH

SEQ ID NO: 82 - protein, 189 aa, synthetic construct
  REGION 1..189: note = pYY-BEM3.13; tr|A0A3Q2Z5X6|A0A3Q2Z5X6_HIPCM polypeptide sequence
MDVHFMNFIYHYKNMRWAKGRNETYLCFVVKRRVGPNSLTFDFGHLRNRNGCHVELLFLRYLGRRLSYSITWFCSWSPCANCSAALSQFLSRMPNLRLRIFVARLYFCDMEDSHEREGLRLLQKAGVQVTVMSYKDYYYCWQTFVDRKKSHFKAWEDLHQNSVRLSRKLNRILQPCEMDLRDAFKLLGL

SEQ ID NO: 83 - protein, 190 aa, synthetic construct
  REGION 1..190: note = pYY-BEM3.15; tr|A0A2K6NY90|A0A2K6NY90_RHIRO polypeptide sequence
MNPHIRNPMEAMYPGTFYFHFKNLWEADNRNESWLCFAVEVIKHHSTVSWKRGVFRNQVDPETHCHAEKCFLSWFCDNTLSPKKNYQVTWYTSWSPCPECAREVAKFLARHSNVMLTIYTARLYYSQYPNYQEGLRRLNEEGVPVEIMDYEDFKYCWENFVYNGDELFKPWKGLKYNFLFLDSKLQEILE

SEQ ID NO: 84 - protein, 202 aa, synthetic construct
  REGION 1..202: note = pYY-BEM3.16; tr|Q6ICH2|Q6ICH2_HUMAN polypeptide sequence
MNPQIRNPMERMYRDTFYDNFENEPILYGRSYTWLCYEVKIKRGRSNLLWDTGVFRGPVLPKRQSNHRQEVDPETHCHAERCFLSWFCDDILSPNTNYEVTWYTSWSPCPECAGEVAEFLARHSNVNLTIFTARLCYFWDTDYQEGLCSLSQEGASVKIMGYKDFVSCWKNFVYSDDEPFKPWKGLQTNFRLLKRRLREILQ

SEQ ID NO: 85 - protein, 202 aa, synthetic construct
  REGION 1..202: note = pYY-BEM3.17; tr|G8GPV1|G8GPV1_CERNE polypeptide sequence
MDGSPASRPGHVMDPGTFTSNFNNKPWVSGQRETYLCYKVERSHNDTWVLLNQHRGFLRNQAKNRLHGDYGCHAELCFLGEVPSWRLDPTQTYRVTWFISWSPCFSGGCAEQVRAFLQENTHVRLRIFAARIYDYDFLYQEALRTLRDAGAQVSIMTYEEFKHCWDTFVDHQGRPFQPWDGLDEHSQALSGRLQAILQNQGN

SEQ ID NO: 86 - protein, 181 aa, synthetic construct
  REGION 1..181: note = pYY-BEM3.18; tr|Q1WBT6|Q1WBT6_SYMSY polypeptide sequence
MALLTAKTFRLQFNNKRRVTKPYYPRKALLCYQLTPQNGSTPTRGYFKNKKKRHAEIRFINKIKSMGLDETQCYQVTCYLTWSPCPSCAWELVDFIKAHDHLNLGIFASRLYYHWCRHQQEGLRLLCGSQVPVEVMGFPEFADCWENFVDHEEPLSFNPSEMLEELDKNSRAIKRRLEKIK

SEQ ID NO: 87 - protein, 211 aa, synthetic construct
  REGION 1..211: note = pYY-BEM3.19; tr|A0A3B4CS14|A0A3B4CS14_PYGNA polypeptide sequence
MDNTNRRKFIYHYKNVRWARGRHETYLCFVVKKRNSPDSLSFDFGHLRNRNGCHVELLFLRYIEVLCPGLWGSGVDGVRVSYAVTWFCSWSPCSNCAQRLTNFLSQTPNLRLRIFVARLYFCDEEDSLEREGLRHLQRAGVQITVMTYKDFFYCWQTFVASRERCFKAWEGLRQNSVRLSRKLNRILQVFISTPVISPLITTHLGQSWAGG

SEQ ID NO: 88 - protein, 315 aa, synthetic construct
  REGION 1..315: note = pYY-BEM3.20; tr|A0A087XZI4|A0A087XZI4_POEFO polypeptide sequence
RKVSYSVTWFCSWSPCANCSIRLAQFLHQTPNLRLRIFVSRLYFCDLEDSREREGLRILKKAGVHITVMSYKDYFYCWQTFVAKSQSKFKPWDGLHQNYIRLSRKLNRILQPALDIKKFIYHYKNLRWARGRCETYLCFVVKKKLHLFMFVIVGRNRLFDLNVTMNNKSLYLIPLHLQLLFLRHLGALCPGLWGYGVTGERKVSYSVTWFCSWSPCANCSIRLAQFLHQTPNLRLRIFVSRLYFCDLEDSREREGLRILKKAGVHITVMSYKDYFYCWQTFVAKSQSKFKPWDGLHQNYIRLSRKLNRILQVQFF

SEQ ID NO: 89 - protein, 189 aa, synthetic construct
  REGION 1..189: note = pYY-BEM3.21; tr|A0A341AEK4|A0A341AEK4_9CETA polypeptide sequence
MASDRGPSAGDATSRRRIEPWEFEVSFDPRELCKETRLLYEIKWGRSQHVWRHSGKNTTNHVECNFIEKFTSERPFHRSVSCCITWFLSWSPCWECSKAIREFLNQHPRVTLFIYVARLFQHMDPQNRQGLRDLIHSGVTIQIMGPTEYDYCWRNFVNYPPGKEAHWPRYPPPLMKLYALELHCIILVP

SEQ ID NO: 90 - protein, 180 aa, synthetic construct
  REGION 1..180: note = pYY-BEM3.22; tr|E2D879|E2D879_MUSMI polypeptide sequence
RNLISRETFNFNFENLCYAKGRKNTFLCYEVTRKDCDSPVSLCHGVFKNKGSIHAEICFLYWFHDKVLKVLTPREEFKVTWYMSWSPCFECAEQVVRFLATHHNLNLTIFSSRLYNVSDPDTQQKLCRLVQEGAQVAVMDLSEFKKCWEKFVDNDGQQFRPWKRLRTNFRYQNSKLQEIL

SEQ ID NO: 91 - protein, 221 aa, synthetic construct
  REGION 1..221: note = pYY-BEM3.23; tr|A0A2K5RDN6|A0A2K5RDN6_CEBCA polypeptide sequence
MWEAQSPGLSREWGSVAISPEDPGPLHIGRFLSCAFRHPMNAMYPGIFNFHFRNLRKAYGRNETWLCFTVEGIMNRSTVSWKSGVFRNQVGSDPFCHAEMCFLSWFRHNMLSPKKDYEVTWYASWSPCPECAGQVAEFLARHGNVRLTIFTAHLYYFWNPSFRQGLRRLSQEGASVLIMGYEDFEYCWDNFVYNDGQPFKPWKRLQDNSLSLYITLQEILQ

SEQ ID NO: 92 - protein, 206 aa, synthetic construct
  REGION 1..206: note = pYY-BEM3.24; tr|A0A2K5RDN7|A0A2K5RDN7_CEBCA polypeptide sequence
MEASPASRPRPLMGPRTFTENFTNNPEVFGRHQTYLCYEVKCQGPDGTRDLMTEQRDFLCNQARNLLSGFDGRHAERCFLDRVPSWRLDPAQTYRVTCFISWSPCFSCAREVAEFLQENPHVNLRIFAARIYDCRPRYEEGLQMLQNAGAQVSIMTSEEFRHCWDTFVDHQGHPFQPWEGLDEHSQALSRRLQAILQGNRWMILSL

SEQ ID NO: 93 - protein, 184 aa, synthetic construct
  REGION 1..184: note = pYY-BEM3.25; tr|A0A1C9CJ69|A0A1C9CJ69_CERAL polypeptide sequence
NPMKAMDPHIFYFHFKNLRKAYGRNETWLCFAVEIIKQRSTVPWRTGVFRNQVDPESHCHAERCFLSWFCEDILSPNTDYRVTWYTSWSPCLDCAGEVAEFLARHSNVELAIFAARLYYFWDTHYQQGLRSLSEKGASVEIMGYEDFKYCRENFVCDDGKPFKPWKGLKTNFRFLKRRLQEILE

SEQ ID NO: 94 - protein, 197 aa, synthetic construct
  REGION 1..197: note = pYY-BEM3.26; tr|A0A2R2Z4D2|A0A2R2Z4D2_PTEAL polypeptide sequence
MHLQVWRKVTEAWREGYTLKPWSRNPMERLYHDYFYFHFYNLPTPKHRNGCYICYQVEGTKKHSRMPLLRGVFENQESLDMMLSPGEKYRVTWYISWSPCFACVDEVIKFLREHTNVELIIFAARLYHSDILQYRQGLRKLHDAGVHVAIMSYYEFKHCLNDFVFHQGRSFCPWNDLNKNSKNLSNTLEDILRNQED

SEQ ID NO: 95 - protein, 206 aa, synthetic construct
  REGION 1..206: note = pYY-BEM3.27; tr|B7T161|B7T161_SHEEP polypeptide sequence
MTEGWAGSGLPGRGDCVWTPQTRNTMNLLRETLFKQQFGNQPRVPPPYYRRKTYLCYQLKELDDLMLDKGCFRNKKQRHAEIRFIDKINSLNLNPSQSYKIICYITWSPCPNCASELVDFITRNDHLNLQIFASRLYFHWIKPFCRGLHQLQKAGISVAVMTHTEFEDCWEQFVDNQLRPFQPWDKLEQYSASIRRRLQRILTAPT

SEQ ID NO: 96 - protein, 205 aa, synthetic construct
  REGION 1..205: note = pYY-BEM3.28; tr|A0A2R2X2G4|A0A2R2X2G4_PTEAL polypeptide sequence
MAGLGQACEGCCGQMPEISYPMGRLDPKTFSFEFKNLPYAYGRKSSYLCFQVEREQHSSPVPSDWGVFKNQFCGTEPYHAELCFLNWFRAEKLSPYEHYDVTWFLSWSPCSTCAEEIAIFLSNHKNVRLNIFVSRIYYFWKPAFRQGLQELDHLGVQLDAMSFDEFKYCWENFVDNQGMPFRCWKKVHQNYKSVLRKLNEILRRR

SEQ ID NO: 97 - protein, 309 aa, synthetic construct
  REGION 1..309: note = pYY-BEM3.29; tr|G1Q1M4|G1Q1M4_MYOLU polypeptide sequence
YAELSFLDLFQSWNLDRGRQYRLTWYMSWSPYPDCAQKLVEFLGENSHVTLRIFAADIHSLCSGYEDGLRKLRDARAQLAIMTRDELQYCWVTFVDNQGQPFRPWPNLVEHIKTKKQELKDILGNPMRRMYPKTFNFNFQNLNSYGRKSTFLCFEVETWEDGSVLDYQNGVFQNQLDPGHAELCFIEWFHEKVLFPDEVRCPDAQYHVTWYISWSPCFECAEQVAGFLNEHENVDLSISAARLYLCEDEDEQGLQDLVAAGAKVAMMAPEDFEYCWDNFVYNRGWPFTYWKHVRRNYGRLQEKLDEILW

SEQ ID NO: 98 - protein, 216 aa, synthetic construct
  REGION 1..216: note = pYY-BEM3.30; tr|A0A1S3AN78|A0A1S3AN78_ERIEU polypeptide sequence
RRIEPWEFEDFFDPRQFRPETCLLYEVRWGSSRNAWRSTARNTTRHAEVNFLERFAAERHFDKPVSCSITWFLSWSPCWECSQAIGAFLSQHPQVTLAIHVTRLFHHEDEQNRQGLRDLLARGVTLQVMGDSEYAHCWRTFVNSPPGAEGHYPRYPSDFTRLYALELHCIILGLPPCLEILRRYQNQFTLFRLVPQNCHYQMIPHLNFFVVRHYFF

SEQ ID NO: 99 - protein, 201 aa, synthetic construct
  REGION 1..201: note = pYY-BEM3.32; tr|Q4VUI3|Q4VUI3_XENLA polypeptide sequence
MTMDSMLLKRNKFIYHYKNLRWARGRHETYLCYIVKRRYSSVSCALDFGYLRNRNGCHAEMLFLRYLSIWVGHDPHRNYRVTWFSSWSPCYDCAKRTLEFLKGHPNFSLRIFSARLYFCEERNAEPEGLRKLQKAGVRLSVMSYKDYFYCWNTFVETRESGFEAWDGLHENSVRLARKLRRILQPPYDMEDLREVFVLLGL

SEQ ID NO: 100 - protein, 191 aa, synthetic construct
  REGION 1..191: note = pYY-BEM3.33; tr|E2RL86|E2RL86_CANLF polypeptide sequence
MNPLQEETFYQQFSNQRVPKPTYQRRTYLCYQLKPHEGSVIAKVCLQNQEKRHAEICFIDDIKSRQLDPSQKFEITCYVTWSPCPTCAKKLIAFVNDHPHISLRLFASRLYFHWRQKYKRELRHLQKSGIPLAVMSYLEFKDCWEKFVDHKGRPFQPWNKLKQYSESIGRRLQRILQPLNNLENDFRNLRL

SEQ ID NO: 101 - protein, 226 aa, synthetic construct
  REGION 1..226: note = pYY-BEM3.34; tr|G1LWB0|G1LWB0_AILME polypeptide sequence
SSAAPASIHLLDEDTFTENFRNDDWPSRTYLCYKVEGPDQGSGVPLGQDKGILHNKPAQGPEPSRHAECYLLEQIQSWNLDPKLHYGVTCFLSWSPCAKCAQKMARFLQENSHVSLKLFASRLYTRERWDEDYKEGLRTLKRAGASIAIMTYREFEHCWKTFVLHDQEGSCFQPWPFLHKESQKFSEKLQAILQVGVLLLSLPPPLPSSPLSSPWPFPAPLRASTG

SEQ ID NO: 102 - protein, 238 aa, synthetic construct
  REGION 1..238: note = pYY-BEM3.35; tr|A0A1U7S7K7|A0A1U7S7K7_ALLSI polypeptide sequence
MGEHWQYAGSGEYIPQDQFEENFDPSVLLAETHLLSELTWGGRPYKHWYENTEHCHAEIHFLENFSSKNRSCTITWYLSWSPCAECSARIADFMQENTNVKLNIHVARLYLHDDEHTRQGLRYLMKMKRVTIQVMTIPDYTYCWNTFLEDDGEDESDDYGGYAGVHEDEDESDDDDYLPTHFAPWIMLYSLELSCILQGFAPCLKIIQGNHMSPTFQLHVQDQEQKRLLEPANPWGAD

SEQ ID NO: 103 - protein, 220 aa, synthetic construct
  REGION 1..220: note = pYY-BEM3.36; tr|A0A2R2X2J8|A0A2R2X2J8_PTEVA polypeptide sequence
MPRIGNMNLLSEKTFNYHFGNQLRVKKPQGRRRTYLCYKLKLPNETLVKGYFINKKKNHAEIRFINKIRSLNLDQTQSYKITCYITWSPCSYCAGKLVALVKSCPHLSLQIFTSRLYYHWLWKNQAGLRYLWKINISVLVMKEPEFADCWDNFVNHQSRRFKPWEKLTQYSNSTERRLLRILRINRTDLFLAQSSEQDPGLNDLVDAIKRLFLDAHRPRD

SEQ ID NO: 104 - protein, 198 aa, synthetic construct
  REGION 1..198: note = pYY-BEM3.37; tr|A0A151P6M4|A0A151P6M4_ALLMI polypeptide sequence
MAVEEEKGLLGTSQGWKIELKDFQENYMPSTWPKVTHLLYEIRWGKGSKVWRNWCSNTLTQHAEVNCLENAFGKLQFNPPVPCHITWFLSWSPCCQCCRRILQFLRAHSHITLVIKAAQLFKHMDERNRQGLRDLVQSGVHVQVMDLPDYRYCWRTFVSHPHEGEGDFWPWFFPLWITFYTLELQHILLQQHALSYNL

SEQ ID NO: 105 - protein, 158 aa, synthetic construct
  REGION 1..158: note = pYY-BEM3.38; tr|A0A2K6MNR2|A0A2K6MNR2_RHIBE polypeptide sequence
IWLCFTMEIIKQCSTVSWKRGVFRNQVDPETHCHAERCFLSWFWEDTLSPNTNYQVTWYTSWSPCLDCAGEVAEFLARHSNVKLAIFAARLYYFWDTDYQQGLRSLSEEGTSVEIMGYEDFKYCWENFVYNGDEPFKPWKGLKYNFLFLDSKLQEILE

SEQ ID NO: 106 - protein, 182 aa, synthetic construct
  REGION 1..182: note = pYY-BEM3.40; tr|F1CGT0|F1CGT0_ANOCA polypeptide sequence
KAAILLSNLFFRWQMEPEAFQRNFDPREFPECTLLLYEIHWDNNTSRNWCTNKPGLHAEENFLQIFNEKIDIKQDTPCSITWFLSWSPCYPCSQAIIKFLEAHPNVSLEIKAARLYMHQIDCNKEGLRNLGRNRVSIMNLPDYRHCWTTFVVPRGANEDYWPQDFLPAITNYSRELDSILQD

SEQ ID NO: 107 - protein, 230 aa, synthetic construct
  REGION 1..230: note = pYY-BEM3.41; tr|C7AGG3|C7AGG3_HORSE polypeptide sequence
MDPQAPTQRGGLGQAYQGGDYVQAPGNGNTQHLLSEDVFKKQFGNQRRVTKPYYRRKTYVCYQLKLLRGPTIAKGYFRNKKKRHAEIRFIDKINSLGLDQDQSYEITCYVTWSPCATCACKLIKFTRKFPNLSLRIFVSRLYYHWFRQNQQGLRQLWASSIPVVVMGYQEFADCWENFADNRGNPFQSWEKLTEYSKGIKRRLQKILEPLNLNGLEDAMGNLKLGSVDLG

SEQ ID NO: 108 - protein, 197 aa, synthetic construct
  REGION 1..197: note = pYY-BEM3.42; tr|A0A250YMK7|A0A250YMK7_CASCN polypeptide sequence
MSLLKEDIFLYQFNNQQQVQKPYFRRRTYLCYQLEQPNGSRPQWPAKGCLQNKKGHHAEIRFIKRIHSMGLEQDQDYQITCYITWSPCLACACALAELKNHFPRLTLRIFASRLYFHWIRKFQMGLQHLYKSGVLVAVMSLPEFTDCWEKFVNHRQVFFTPWDKLEEHSRSIQRRLRRILQSWDVDDLTDDFRNLRL

SEQ ID NO: 109 - protein, 189 aa, synthetic construct
  REGION 1..189: note = pYY-BEM3.43; tr|B7T160|B7T160_SHEEP polypeptide sequence
MPWISDHVARLDPETFYFQFHNLLYAYGRNCSYICYRVKTWKHRSPVSFDWGVFHNQVYAGTHCHSERRFLSWFCAKKLRPDECYHITWFMSWSPCMKCAELVAGFLGMYQNVTLSIFTARLYYFQKPQYRKGLLRLSDQGACVDIMSYQEFKYCWKKFVYSQRRPFRPWKKLKRNYQLLAAELEDILG

SEQ ID NO: 110 - protein, 541 aa, synthetic construct
  REGION 1..541: note = pYY-BEM4.1; tr|A0A182D0J1|A0A182D0J1_BLAVI polypeptide sequence
MTNPESPPQAPCDFNEDALLNREPLRGSPIKFVSPVDYPDLVFALAGPVGVDIDYIQQSISDCLKSFDYSTEFIRITEIMQDIKCSKTIDCTDMLKEYQSKIEYANELRRAYRAKDLLAALTISAISKLREQIKERDEATNKSNIQPSRRKLAWVVRQLKTPEEVRLLRAVYGKQFVLVSIYSSPQRREDFLISKIKIKSRGTIDNNTSSEGAQRLIERDSKEDNEYGQNLSGTFCLGDIFVDSNNKESAIVSIDRFLNAFFGSNEISPTRDEYGMYLAKTASLRSCDLSRQVGAAIFSKTGEIISLGSNEVPKAGGGTYWTGDNADSRDIRLGHDPNEINKVEIFAEIISRLLEDKLLSNDLLNKDAASIVTILLSKNEGKRYKDLRVMDIIEFGRIIHAEMSAICDAARNGRAIIGATLFCTTFPCHLCAKHIVASGIGRIVYLEPYPKSYAKKLHSDSIQVEDHSDSEKVSFEPFIGISPSRYRELFEGGRRKDPFGEALKWKNDPRKPVIDVVVPPHFEAEKLVIAQLGKLIVSGTG

SEQ ID NO: 111 - protein, 330 aa, synthetic construct
  REGION 1..330: note = pYY-BEM4.2; tr|A0A2D6EXD2|A0A2D6EXD2_9ARCH polypeptide sequence
MIIGLVGTIGAGKQTIIDYLQEKYGYNALSCSDVLREILKKQGKPVTRDNLREIGNKTREEGGNGAIAKILLEKLRNNWKANYIVDSLRHPDEVSVLRTSPLFHLVAVDADLRIRFERVKARKREEEPTTLPAFVERDQKEMFGTGNEQRIRETMELADELVLNNGTVEELKQRIDDLNLVSDERLRPSWDDYFMRLARLAAQRSNCMSRKVGAIITKDRRVIATGYNGTPRGVKNCNEGGCERCNSAVAKGTAISECLCLHGEENAIIEAGRVRSEGATIYTSFLPCLWCTKMIIQAGLKEVVFSEVYDLHEASIKLFETSGVLIRRLK

SEQ ID NO: 112 - protein, 367 aa, synthetic construct
  REGION 1..367: note = pYY-BEM4.3; tr|F7YVM7|F7YVM7_9THEM polypeptide sequence
MNEFKYMSLALKLAKKGKYTTSPNPMVGAVIVKDGKILATGYHKKAGQPHAEINALSKLNFQAQNCEMYVTLEPCSHYGRTPPCADAIIRSGIRKVVIATLDPNPLVNGKGVEKLKNAGIEVVCGVLEEKAKKLNEKFFKYITTKIPFVALKIAQTLDGKIALKNGESKWITSEKSREYVHKLRMEYDAVLTGIGTILKDDPQLNVRLKKVYKQPLRIILDSKLKIPLSAKVLEDPSKVIILTTALADKEKLEELRSKGVEVIITNEKNGIVDLESALKILGEKKITSVMVEAGPTLLTSFLKESLFDKIYLFIAPKIFGADSKSVFSELGLEDISKSQKFSLESVKKIGEDLLLELYPKQLKKLEE

SEQ ID NO: 113 - protein, 449 aa, synthetic construct
  REGION 1..449: note = pYY-BEM4.4; tr|A0A3M6UNF1|A0A3M6UNF1_9CNID polypeptide sequence
MEEKSELENELMRSTSPKPSVPNGSKGNECEQRETRITKENLYMVLALWMEEFPVVEQTSSAKRLNKVGVVFVLPTDRVLAADCSRDGVHGVARVMVNHCGKLEGCKVFVSRKPCSLCAKLLVQSKVSRVFYLPIEPESENKGEIARADNLFKNSSVGQSVFVPCVEQKVLDKLEDKLPKEIITPDDISECRDNLLKKCGWSAEWFARAQASLPWPCFEGKMKSQVDNDFKSLIKWIAVVKAPMDKGVAFPKVKLTSDSRVVPDCDADNFPDSKTAYHMMIFAKMLARQTDDPKTGVGAVIVRGKVPDIVSLGWNGFPSKALYGEFPRASDDDRALQKKFPYVIHAEQNALMVRNVKDLTDGILFVTKPPCDECAPMIKLSGVKTIVIGEKIEKSRGGELSYNLIKEYIKEGIMTCYQMEATKTKAKRLASDPETRKRLKSSCSNSNDV

SEQ ID NO: 114 - protein, 414 aa, synthetic construct
  REGION 1..414: note = pYY-BEM4.5; tr|A0A2G3K826|A0A2G3K826_9BURK polypeptide sequence
MTKIIDDVNTAAAAVLDQATAAANQTTFAVGGVMVNNQTGEVISAIHNNVIIPLSNNVSFTFDPTAHGERQLVYWYYANKEALKLPEPNQITVITSLDPCAMCTGALLTAGFNVGVVAIDTYAGINCAQNFQFATLPANLRTKAQKNFGYYASGAANFKPLTRSYVGGPSVAFKNGVVTPANLRDCGTVFTQSVDTVRNTSNSTGLAPSQMSNPAELPSNSAILQAYRAIYKKAFTIKIDNPRLPDAQILTELKAVLADAPNARNAVAFIDPFGNLVLCMADAFNTSPVHAAFMNVTQEYAKTRWDLMNKYAQASTTDNPALYLTHPKYGTFVYLYAPDPDDSITIMSLGAYGSTMEGPIPNMFPSNLQFYYPPRNGAQFSELVPVVNELPPFYTQNVNISLMQVPGVTQAPTK

SEQ ID NO: 115 - protein, 308 aa, synthetic construct
  REGION 1..308: note = pYY-BEM4.6; tr|K1ZCJ4|K1ZCJ4_9BACT polypeptide sequence
MSSRAKKNRSTNLKKSIGQKSIENKPTDQKKDQVLVAYVPVIHEGYRRFFRHFPAVKELWLISQELSHELRSLQKDIRALKASETKKLLQTWGQFQKIKLLTPSSLAILQKTTTQLVFPDEEISHHLVEKYFAQNRVLFASFFLRWDKKSSLKKHDLQEYSEISNKEFDQMMIAIAQQEADKSDDWWRQVGGLIFKDETILLLAHNQHTPTEAEAYFAGDPRADFHQGEYLKISTAIHAEAYLIAQAAKQGISLEGADLYVTTFPCPVCAKQVAYSGIKRVFFREGYSLLDGETILKANGVKLIRVTV

SEQ ID NO: 116 - protein, 615 aa, synthetic construct
  REGION 1..615: note = pYY-BEM4.7; tr|A0A1G3PNQ8|A0A1G3PNQ8_9SPIR polypeptide sequence
MRDLPLLVLGLTGPMGAGCTRFARDISKMEPGKVIKKQGLLDQVAHEISELSKKASEIRLQCISNGKNSELAELKRLNRRLNAKLAERACLHVIAKSSLPEPLFISLNTIVIKIAVDSITAPEFAEWAKNHAKVADLLKWLRTQWESELTLYETWGQDAGRFSQDELEKMDAMFAEFERIGDEILKEDFETYFGKRNNDFSIRMFSENIRLSGNPFRPAENGGGGGKYDEPSMVMIARETDRYIRFYRTRSDQKRSHFFIIDEIKNPREAEYFRARHQNFFLVSIFSSSEIRASRMRRGLGHDAGVSDADFQHLFRELDSRDWGADDFDAHGLHRQNIYRCFNLADIAINNDVEDERFSEVLFNKFIRYYALMLSPGCVQPTPQETYMHLAYSLSLRSTCISRQVGAVITDLEDRILSLGWNEVPEGQIGCGLKVKKDYTDKENPLFEMEIWDNVITAEDLAVWDDEDSICVKDILSRIEIKTKLKSVSLTPEERADVLKALRIKRLEYSRSLHAEENAILQVASRGGVGLKDGTIYVTTFPCELCSKKIYQVGISKIYYTEPYPNSISEKVILKDGIRNIKILQFEGVKSYSYFKLFKPGFDKKDAQMLEGRGI

SEQ ID NO: 117 - protein, 291 aa, synthetic construct
  REGION 1..291: note = pYY-BEM4.8; tr|A0A1G0PGF4|A0A1G0PGF4_9BACT polypeptide sequence
MKHNNQLRKEIEKLLGQNSIIKNDELKKLQKEYKIETDELLISFLPYAAEFAKVPISKYKVGAVVLGKSGNIYFGSNMEFEAGALSATVHAEQSAVNNAWLNGETGINKIAVTAAPCGYCRQFLNELTTAKQLHVLLKDKNLEAAKVFKLTELLPEAFGPRDLEIEGGLMKVENHKLKIENINDELINAALEAANKSYAPYSKNYSGVSIQLSDGTIFSGRYSENAAYNPSLLPFQSALAFMNMNTKKGSNNKIVDAVLVEAVSNISQKDAAGTLLNSISKTKLRYYKIKN

SEQ ID NO: 118 - protein, 398 aa, synthetic construct
  REGION 1..398: note = pYY-BEM4.9; tr|A0A0P4WGY5|A0A0P4WGY5_9EUCA polypeptide sequence
MEENSSATSQPKCASRTKQGGNDLSTDMSNLSVGETKRTDFLPWDDYFMAVAFLSAMRSKDPSSQVGACIVNADKKIVGIGYNGMPIGCSDDELPWNKESLDPLQTKYMYVCHAEMNAIMNKNSSDLAGCCVYVALFPCNECAKLVIQAGIREVVFFSDKHQQKPETVASKKMLNMAGVAYRQYTPSQSKIELNLSLKEQEKSEPTADITQSSERDQNSKRKDYLSWEEYFMAMAHLSALRSKDPITQVGACIVNSKKKIVGIGYNGMPLGCNDDLMPWGNSSSNKLETKYMYVCHAGVNAIMNKNSCDVSGCTLYVALFPCNECAKVIIQAGIKTIIYASDTNKDQASILASKKMLDMAGIKYRADNLSQRKIVIDFKTIDWNSRFMNDHQNDPTCL

SEQ ID NO: 119 - protein, 259 aa, synthetic construct
  REGION 1..259: note = pYY-BEM4.10; tr|A0A3D8IG27|A0A3D8IG27_9HELI polypeptide sequence
MRKNILYFILTLFFLSGLYATSLPEDNVVSGVIYEKIDTVSAEVDHIYPMLALAIVYKDWQEKNMLNKQGHNIGLVIVDENNMPVFWVRNSVHATHNGTQHGEVRLVSNLLNCEGFNKYLDKYTLYTTLEPCIMCAGMLSMVQIPKVVYAQKDLSCGNTQEIISTAKYPRYYKAFTVENGYKKDLEECFEQYKICKNDSITDFLVNDSAKEIFRKASNDLQDYKVKFKENRRVIKVAQEFLQNIQTKDNLDVLQCPKNM

SEQ ID NO: 120 - protein, 256 aa, synthetic construct
  REGION 1..256: note = pYY-BEM4.11; tr|A0A351C8C4|A0A351C8C4_9BACT polypeptide sequence
MNELTKQSEHLRNEALRIATRSYVPYTGQQEGVIILLENGDLIPGVRVENASFQLTIPALQNALSTMYALQRTDISMIVSSIPFTDSDLAYTGGMAEIAWEMVGASLLLVAGAHIPEAGTFIDPARGENLLDVSREAALNAFIPESDFPVGSAIQTSDDVVIDGCNVEHSDWSKIICAERNVLSTARSYGLGQITTIYVSCPKEPGGTPCGACRQVIVELAPDATVWMDRGNQEPIAMKATKLLPGHFTGNVLKKQ

SEQ ID NO: 121 - protein, 301 aa, synthetic construct
  REGION 1..301: note = pYY-BEM4.12; tr|A0A1G6V2K7|A0A1G6V2K7_PEPNI polypeptide sequence
MPIVRVNEIGARLPEDWEALETAIWQAYVSREDLPDAGELDLTLVDDATIQELNKTHRQLDKSTDVLSFPMYDDRDDLAADVQAGLPVILGDIMISVPTAERQAQAYGHSFKREMAYLLVHGLLHIAGYDHMSAEEKSAMRRAEEAILADVDVPRDTAPSKTAAVLDEADVQALIDAARAARLQAYAPYSGYAVGAALLAADGRRFCGVNVENASYGATCCAERTALFAAVTAGARDFIALALVTEGDEPAPPCGLCRQALAEFSPDLAIYLAGPTGETYRRTSLAALFPEAFSLSTKESV

SEQ ID NO: 122 - protein, 528 aa, synthetic construct
  REGION 1..528: note = pYY-BEM4.13; tr|F2NP91|F2NP91_MARHT polypeptide sequence
MPVMETHALEARFKEALARLCPEGRLLAAVSGGGDSVALLYLLKAAGRDTIVAHLDHALRPDSAADAAFVEKLAQRLGFPLETEHVDVRALAHRKRINLEAAAREVRYAFLARVARRWKARCILTAHTLDDNAETVLLQILRGAGRGLGIRPLQRRVARPLLEFSRAELRAYLEARGARWLEDPTNRSLELDRNYLRHAVLPRITARFPHALEALARFSQAQQADDWALEALSARHLIPDRRWPVPAYRALPLERAPEALRRRAIRGVLEALGVRPEARLVADVEAALGGRAQTLPGGVVVRRQRGTLFFIPPTVRFPKVQPPAGLEARPPRPGDYLVFPYGRKRLVDFLNERGVPRELKRRWPVGAVGAEVRWVYGLWPEPDEDRYMRRALVLARAAARQGEVPIGAVLVRDGAVLAEAANAVEASRDATAHAELLALRTALRRVGEKVLPGATLYVTLEPCPMCYGAILEARVARVVYGVENLKAGAFTVHGLEPRVALEAGRVEGECAKVLKDFFARLRPGRDGA

SEQ ID NO: 123 - protein, 226 aa, synthetic construct
  REGION 1..226: note = pYY-BEM4.14; tr|A0A316TX77|A0A316TX77_9BACT polypeptide sequence
MINGYTPYSGNQNTCYVKGESGTFYPGVRIENVSYPLTISSVQAAVCSCLANSDNPVEYYTGDHQPELLQVWADEYDMKPGGKLPDSPLKLFDPLVPSIPDIKKELDVLTEKSVTPNSGFPVSALLQTEKGYIRGVNIELSSWALGLCAERVAISRALTAGYTQFKSIHIYAPEADFVSPCGACRQVLLEVMPDADTELYHGDGTLSKHIVSDLLPFGFTSHKLKK

SEQ ID NO: 124 - protein, 321 aa, synthetic construct
  REGION 1..321: note = pYY-BEM4.15; tr|R6VYG3|R6VYG3_9FIRM polypeptide sequence
MIHKGTQTIETKRLILRAFTPDDAEAAFENWMSDPKVTEFLRWKTHADISDSRKIVNEWANGSADPEFYQWAIVPKDVNEPIGTISVVDRNDALGIFHIGYCIGSKWWHKGITSEAFSAVIHFLFEEVGANRIESQHDPENIHSGDVMKKCGLTFEGTLRQADFNNRGIVDACVYSILQSEWQNNTSVWQRLYNAALTVQNDRVVSPFIDAGGVAAALMTKKGNIYTGICIDTASTLGMCAERNAVANMLTNGESRIDKIVAVMPDGKVGAPCGACREYMMQLDRDSGDIEILLDLETEKTVRLKDLIPDWWGAERFGDTE

SEQ ID NO: 125 - protein, 229 aa, synthetic construct
  REGION 1..229: note = pYY-BEM4.16; tr|A0A3C1HZ18|A0A3C1HZ18_9BACI polypeptide sequence
MGDIMENWNELSEPWKRCFLQAWKAYCHGSIPIGAVLVDSEGEIFLEGRNRVHELTAPEGQLCDCRIAHAEMNVLVQVKTSDYEKLSGATIYSTMEPCIQCFGAIILSRIKNISFAAIDDKLAGATTLEDRHGFIKSRNLNIAGPFSHLGEIQIILRTDFLLRIFDSEYADPLIAAHEKDYPIGVALGRHYHRNNRLQVAKKETIPFGELFNEFSFDIKRAREGYTLGK

SEQ ID NO: 126 - protein, 205 aa, synthetic construct
  REGION 1..205: note = pYY-BEM4.17; tr|A0A1M6KV24|A0A1M6KV24_9BACT polypeptide sequence
MEASQQNILLKIEGKGPVAEINFTVTLPEWLVEQVQSGSTVFLTQKEKMRFVLELARKNVAQETGGPFAAAVFSLESGELVSAGVNVVVESRCSSAHAEVVALSLAQKAVDSHDLGAAGLPRMVLVSSAEPCAMCMGAIPWSGVKQVICGARDEDVRSVGFDEGAKPLEWVEDFAERGIEVIRDVLREEATEVLWDYRERGGEIY

SEQ ID NO: 127 - protein, 207 aa, synthetic construct
  REGION 1..207: note = pYY-BEM4.18; tr|A0A2U0T9B4|A0A2U0T9B4_9RHIZ polypeptide sequence
METAELISRLLDVIEKDIAPVTAKGVARGNKLFGAAILKKSDLAVIVAETNNEIENPLWHGEMQAIKRFFELPADQRPATRDCLFLATHEPCSLCLSGITWSGFDNFYYLFSHQDSRDGFAIPYDIQILKSVYAVPEPETGTVSPARDLYNRSNDFWTSHGLQDMIAGLARSNREALLARIDDLNALYAELSERYQRDKGGKGIPLP

SEQ ID NO: 128 - protein, 231 aa, synthetic construct
  REGION 1..231: note = pYY-BEM4.19; tr|A0A2K9PN08|A0A2K9PN08_9FLAO polypeptide sequence
MSDKKESKIKISKTSESIELDEIHSLLSYSIVQKFWENDDRNGRGYNVGVILVDENKNIVDWDINSVNKTENSTQHGEMRLISRYLDKDELYSLKGYTMYPTLEPCAMCAGMMTMTNVYRTVNGQMDYFYSKALERLSIDTRECGGYPPYPRTVISEISPSSISTRLDAEYKQYTNAGNKPIITKFLSTYKAKTIYDDAFNQFINFKCKFPENKTKYENAIKFYNSLPESI

SEQ ID NO: 129 - protein, 330 aa, synthetic construct
  REGION 1..330: note = pYY-BEM4.20; tr|F4PWM7|F4PWM7_CAVFA polypeptide sequence
MRFSLSLLFVILSVLLAGVLACKDPYNPETVDYGQCASATKANYEVRSDSKVLTPADLPADELAVHESRMRHIIDIARVNNKKFVSSIYFPNGTLACIGINTGKPNMIAHGEIVAIQNCTEIHGISMYTNYSIYTTGEPCSMCASAILWSRFKTVVWSTYNSDLYCKICMSNIPIDSSYIFSRAYGLGIEAPVAIGGVVKAEGDAWFGTYCNRPTSIYYIAPKCACQDPAKVSPLKFTQTRTTVWVEGGDKVVTQWNAIISNPSNSTIVDPPIVISPSVVFKGAPWGISAASEPNTYKLSYNKVLFPGQTFSFGYSVYGLEEVAFTALEA

SEQ ID NO: 130 - protein, 193 aa, synthetic construct
  REGION 1..193: note = pYY-BEM4.21; tr|U7QZM1|U7QZM1_PHOTE polypeptide sequence
MNKTRRKLLATLGIMSISMSFIAQAGEKKTQVINNILSKQEITEHEKYMREAIKEAIKNPKHPFGAVIVNRNNGEILSRGVNTGRNNPILHGEIQAINHYITQYGNQGWENVALYTTGEPCSMCMSALVWIGIREVIWATSISVIRNSGIRQIDISAHEIAERASSFYNPITLVGGILANETDKLFLERKRGN

SEQ ID NO: 131 - protein, 319 aa, synthetic construct
  REGION 1..319: note = pYY-BEM4.22; tr|A0A081CH48|A0A081CH48_PSEA2 polypeptide sequence
MASRRHLLATQVTGNHRKLSLWHLRGWLSPYTKLVDAVYFLTTNSFYHSLQTPPVQSITMLLSSIITSLALAAQASAYREGLHPEFQSGLSINSVPATDRDHWMRLANSAIYYPPVSHPCPQAPFGTAIVNTTSNELICAIANRVGSTGDPTQHGEITAIQHCTNVMRKKGLSPQEIIAAWKQLSLYTNAEPCTMCLSAIRWAGFKEVIYGTSVGTISENGRNQIYIPSNLVLEKSYSFGHATLMLGNILTHETDPFFQHQFNESAPCPVGCERTQVGEARVKTCEPVPNWQKLVRLEYSEDSRVGSEPVAHTPLHLEL

SEQ ID NO: 132 - protein, 203 aa, synthetic construct
  REGION 1..203: note = pYY-BEM4.23; tr|A0A3D3HMU1|A0A3D3HMU1_9GAMM polypeptide sequence
MDYSDAILGAITSIRRNSKQPGVNVTDNVTDSSTQYNNDEYWMRRALALAREAGEAGEIPVGAVLVKDNQQVAGGFNQPIRSHDPAAHAEILTLREAGAVLGNYRLIDTTLYVTLEPCMMCAGALVHSRIKRLVFGAAEPKTGAAGSFIDLLTLPRLNHYMEVTGGVLGEECSVLLSDFFRRRRAEKKALKRQNSESGSDSAS

SEQ ID NO: 133 - protein, 270 aa, synthetic construct
  REGION 1..270: note = pYY-BEM4.24; tr|A0A1N5WT13|A0A1N5WT13_9ACTN polypeptide sequence
MLEKIERRLVAAAEAVVRSPSTGDAHTVAAAAMDANGDIYSGVNVFHFTGGPCAELVVIGSAAAANAPPLITIVAVGDGDRGVIAPCGRCRQVMLDLHPDVFVIVPTGDGQLAAKPVRELLPFGYVARTGSTAPRVVYFHPRHYDTISSGLKTATVRFQDSVQTGPAVFVFDDGESIRRLDAVVEKVESRRLDHLTEEDAHHEALPDSDALRDAIKTQYPMLGDGDVVDVATFRLTAISAPDPDPRSSYPPAVSRCNPAGPRADLLVGQS

SEQ ID NO: 134 - protein, 257 aa, synthetic construct
  REGION 1..257: note = pYY-BEM4.25; tr|X0SAC5|X0SAC5_9ZZZZ polypeptide sequence
MTKDGRVIASAHDTEVTDQDSTAHAEINAIRKASKIYRKDLTGCLIISTHEPCPMCTGSIIWSNISKVVYGVSIRDSIKAGRDMINLSCKEIIKKPNAEINIYDGILKKECLKLYNNDTRKLVKKFRKYEWINIEENLLNKRMQWFENNKTMIRKLKGNDLEKAYHLILMKIGIKRSEAPIVKKSESKIIFHSKNYCPSLEACIILDLDTREVCKEIYERPTEELIRRLNSKLRFTRNYDCIRPYSDYCEEIIILEK

SEQ ID NO: 135 - protein, 154 aa, synthetic construct
  REGION 1..154: note = pYY-BEM4.26; tr|A0A3B8IC10|A0A3B8IC10_9BACT polypeptide sequence
MPSHEDFIHQCLELGKEALLQGNPPVGSVIVWQDQVIGRGIENGRSSGDITQHAELLALQEAVATGQRDKLKEAIIYSTHEPCVMCAYPIRQYKIPTVVYSVAVPELGGHTSSWHLLTTEDVPKWGKAPKIITGISAEEVEALNAAFQDSLKKG

SEQ ID NO: 136 - protein, 180 aa, synthetic construct
  REGION 1..180: note = pYY-BEM4.27; tr|A0A2N9P8B9|A0A2N9P8B9_9FLAO polypeptide sequence
MFIFKLISPPVSIEVYQDKIIQKLYICFMENIFTDEYFMKKALQEAETAFQQGEIPVGAVIVIDNRIIARSHNLTEMLNDVTAHAEMQAITASANFLGGKYLKDCTLYVTLEPCQMCAGALYWSQISKIVYGATDEQRGYRAMGAQLHPKTKVISGIMQNECTHLMKDFFKQRRSKSTKD

SEQ ID NO: 137 - protein, 178 aa, synthetic construct
  REGION 1..178: note = pYY-BEM4.28; tr|K1KX30|K1KX30_9BACT polypeptide sequence
MVKNPVNNNELYFGKHSEIPMNEEQKAYMKMAVDLSRSGMESGKGGPFGCVIVKDGKVIGIGSNSVLETNDPTAHAEIVAIRDACRNLGHFQLDGCEVYTSCEPCPMCLGAIYWARPSKVFFANDKRDAAEAGFDDDFIYQELELPYEKRKIPFEQGMQDTAKEVFQEWILKEDKTLY

SEQ ID NO: 138 - protein, 196 aa, synthetic construct
  REGION 1..196: note = pYY-BEM4.29; tr|R4XI84|R4XI84_TAPDE polypeptide sequence
MSSEIEPPSTDVHKHAVAEAADESGAADAFMQIALQQAETALLNKEVPVGCVFVHQPTGTVLATGANQTNASLNGTLHAEFVAIESILRDHPPSIFRESDLYVTVEPCVMCASALRQLQVRKVYFGCGNDRFGGCGSVFSIHSDASKTGDAAYMVESGIFRKEAIMLLRRFYLLQNESAPKPALKSTRVLKEHFDE

SEQ ID NO: 139 - protein, 212 aa, synthetic construct
  REGION 1..212: note = pYY-BEM4.30; tr|A0A239CVF7|A0A239CVF7_9DELT polypeptide sequence
MSPASKKHFPSLFSFLLLTIGLICGTAHAQPQGHTADDTAATLANASLKEHEPFIRRCYQLAIDAGKKGNHPFGALLVHKGKIVLEAENTVLTDNDFTNHAEMNLIAEAARTLSRQIIPEATVYTSCAPCAMCTATLAMAGFTRIVYGVSHDALNKRFGLKGKSVSCPALFKTMGMELEFVGPVLEKEGLRVFDFWPEKDPHAQMLKKQARK

SEQ ID NO: 140 - protein, 320 aa, synthetic construct
  REGION 1..320: note = pYY-BEM4.31; tr|A0A1Q3NME1|A0A1Q3NME1_9BACT polypeptide sequence
MTEFNYDWAKLAFSSKRPLTNLKATFIIAPREISEKRFTQLLKEYLPKGDILLGISKEDYVEGLEGQPQFAMLQQKTLQKLIDKVNDASAHKVYTLRYFQRELPAIIEKLTPPRVVGIHGSWHHSFHTLPIYYLLSEKRIPYQLVAAFSDEDEARAYEVATDKKIVRPTLEGSFDDTTVLQLTDEVAKSSYDYGFQTGAILAEKVNGVYQPVAAGFNKVVPYQTYALLNGASRETNFSPANDMNHYDTIHAEMQILVEAAKQGISLKDKTLFVNLMPCPSCARTLSQTELSEIVYRIDHSGGYAVDLLTKVGKDIRRIVY

SEQ ID NO: 141 - protein, 180 aa, synthetic construct
  REGION 1..180: note = pYY-BEM4.32; tr|A0A2G6N4N7|A0A2G6N4N7_9DELT polypeptide sequence
MKERTVSYSDRHFMAEALEMAESALTQGEFPVGCVIADGTAVVARGHRTGTTAGAVNEIDHAEINALRHLGLAGEHLDRTDLTIYSTMEPCLMCFAAIVLSGINRIVYAYEDVMGGGTGCDLTGLPPLYRDAPLTLVAGVRRRASLNLFRRFFTDPENGYWAGSLLSRYTLNQTKDSHRL

SEQ ID NO: 142 - protein, 156 aa, synthetic construct
  REGION 1..156: note = pYY-BEM4.33; tr|A0A0G0RBB8|A0A0G0RBB8_9BACT polypeptide sequence
MQSVQYNKLTHLQRRALDEAEQVLENSYNPYSHFYVGACLISEDEQLIAGTNFENAAYGSAICAERAAVLRANAMSIRRFRGIAIIARGEDFNTTEVTGPCGSCRQVLYEISQVSGCDLQVILATSKKDKIVITTIRELLPLAFGPLDLGVDIGKY

SEQ ID NO: 143 - protein, 217 aa, synthetic construct
  REGION 1..217: note = pYY-BEM4.34; tr|A0A327L2Q5|A0A327L2Q5_9RHIZ polypeptide sequence
MVTSRDGEDEAMMARCVALSRIAVGKGEYPFGAVVAREGRIVAEAINRTIRDGDVSRHAEVIALARAQKAIGRRELRECSLYSNVEPCAMCSYCIREAWVGRVVYALGSPVMGGVSKWNILRDDGLSGRMPQVFDAAPEVVSGVLVEQAQAAWRDWSPLAWEMITLRGLMTDPSARPECRTRAARPRSLWHHLVALIERPPRPYVDPTSAAEGHADL

SEQ ID NO: 144 - protein, 162 aa, synthetic construct
  REGION 1..162: note = pYY-BEM4.35; tr|S2DR30|S2DR30_9BACT polypeptide sequence
MKMKKKIEITVSLEVIQKSEWSKEDRSLIERAIHAVEHAHAPYSNFMVGTALLLDNGQIFSANNQENVSFPVGICAERAVLSYAMGNFPNNRPVKLAVVAKRRSDSTWATVTPCGLCRQTINEYEVKFGHPIEILMLNPGEEILKASGIDQLLPFRFNDLNS

SEQ ID NO: 145 - protein, 153 aa, synthetic construct
  REGION 1..153: note = pYY-BEM4.36; tr|A0A369QGF1|A0A369QGF1_9BACT polypeptide sequence
MEEHEKWMHWCLNLAQQALQQGDFPVGAVVVQKGKLIGQGVEAGQLKKDITCHAEMEAIRDARQTINTADLQNCILYSTHEPCIMCSYVIRHHKISRVVVGTTVPEVGGSSSAYPLLSAPDISIWVAPPHLVTGVLAEACQALSQAYKQKFKK

SEQ ID NO: 146 - protein, 159 aa, synthetic construct
  REGION 1..159: note = pYY-BEM4.37; tr|A0A1W6X4U4|A0A1W6X4U4_9RHIZ polypeptide sequence
MTNPSRQERWDRRFLELAKVFGTWSKDRSAGTGCVIVGPDRLLRASGYNGFARGIDDEVPERHERPAKYSWTEHAERNAIYNAAKLGISLDGCTAYVNWFPCIDCARAIVQAGIVRLVGLHPDHADQRWGSEFKFATEMLRESGIEIILYDIPELAARK

SEQ ID NO: 147 - protein, 490 aa, synthetic construct
  REGION 1..490: note = pYY-BEM4.38; tr|A0A238BW09|A0A238BW09_9BILA polypeptide sequence
MEEMARKIRTKAKKANSYCNTMTFLISKASIVLLKAECKRIELTVVIFRFLIKMNASEPNNELCDMTVIKSMLKITHVIFDLDGLLIDTEVVFSKVNQCLLSKYNKKFTPHLRGLVTGMPKKAAVTYILEHEKLSAKVDVDEYCKKYDEMAEEMLPKCSLMPGVMKLVRHLKTHSIPMAICTGATKKEFEIKTRYHKELLDLISLRVLSGDDPAVKRGKPAPDPFLVTMDRFKQKPEKAENVLVFEDAANGVCAAIAAGMNVIMVPDLTYMKIPEGLQNKINSFSDNLIISNDLNVALMSLKKELSEEEVHFLNRAFEIAVDAVLNNEVPVGCVFVFEGQEVAFGRNDVNRTKNPTYHAEMVALKMMKQWCMDNGRDLEEIMRRTTLYVTLEPCIMCASALYHLRLKKILYGAANERFGGLVSVGTREKYGAKHFIEIMPNLSVDRAVKLLKEFYEKQNPFCPEEKRKVKKPKKSGNNNDNSDDAVALNV

SEQ ID NO: 148 - protein, 159 aa, synthetic construct
  REGION 1..159: note = pYY-BEM4.39; tr|A0A1J5H6Z0|A0A1J5H6Z0_9BACT polypeptide sequence
MAYQPSEKFMQMAIDKTREGVLSGQTPFGACIVKDGKVVACEHNTVWQDTDITSHGEVHTIRAACKAIGSIDLSGCILYSTCEPCPMCFSAIHWARIDTVVYGAFIADAQDAGFNELTISNEKMKEFGGSPVNFISGFMRDENVALFKLWKEQGANNVY

SEQ ID NO: 149 - protein, 168 aa, synthetic construct
  REGION 1..168: note = pYY-BEM4.40; tr|A0A3C2D945|A0A3C2D945_9BACT polypeptide sequence
MKTTEIRIIVHEYQNIDELTENDQYLLHEARRITEFAYAPYSGFHVGAAILLGNGMIVKGNNQENSAYPSGLCAERVALFYANANYPDSEVKTIAISAAKNGILVNDPIKPCGGCRQTLSEAEVRFGSPIRIILDGQDSILVLHGVESLLPLSFSKKDLASPLAATGR

SEQ ID NO: 150 - protein, 214 aa, synthetic construct
  REGION 1..214: note = pYY-BEM4.41; tr|A0A1I7EYS3|A0A1I7EYS3_9BURK polypeptide sequence
MKFKLDPSRPPDEDDYYLGVALAVRRKANCTGNRVAAVIVKNKRVIATGYNGVPEDMPNCLDGGCLRCSNPGGQFKSGTRYDLCICVHAEQNALLTAARFGISVEGAHLYTTMQPCFGCAKEILQAKIEKVFYLHPWVPTDVDPVMDAAMKAEYAKIIGKLKVKKLDFDDPVATWAVTTMRQAALASDKNPDKKTPPKTAKKKVAKKKSRTSPR

SEQ ID NO: 151 - protein, 155 aa, synthetic construct
  REGION 1..155: note = pYY-BEM4.42; tr|H8GQX8|H8GQX8_METAL polypeptide sequence
MNHEHFMRRAIELARQAPQYPFGAVIVRRDDGQCVGQGFNRSDLNPTYHGEMVAINDCAVRHCAEDWRGFDLYTTAEPCAMCQGAIEWAGIGRVFYGTSIPYLQKLGWWQIDLRAAEVSARAVFRDTLIVGGILETECNALFAAARRGCFGTGSE

SEQ ID NO: 152 - protein, 156 aa, synthetic construct
  REGION 1..156: note = pYY-BEM4.43; tr|A0A0S8HZN3|A0A0S8HZN3_9CHLR polypeptide sequence
MDEHDIRFLRASFDVARNARKNGNHPFGALLVDEHGRIVMEAENTVITAKDCTGHAETNLMREASSKYDSDFLANCTIYTSTEPCPMCAGAIFWSNVRRVVYGLSEESLYEIAGRGSEEVLFLSCREIFERGKKLIEVIGPLLEDEAREVHMGFWR

SEQ ID NO: 153 - protein, 193 aa, synthetic construct
  REGION 1..193: note = pYY-BEM4.44; tr|E3SF31|E3SF31_9CAUD polypeptide sequence
MKPTTVLQIAYLVSQESKCCSWKVGAVIEKNGRIISTGYNGSPAGGVNCCEHAEEQGWLLNKPKPVLIPGHKSECVRFSQVDRFVLAKAHREAHSAWSKNNEIHAELNAILFAARMGSSIEGATMYVTLSPCPDCAKAISQSGIKKLVYCETYDKNIPGWDDILKNAGIEVFNVPKRSLDKLNWENINEFCGE

SEQ ID NO: 154 - protein, 330 aa, synthetic construct
  REGION 1..330: note = pYY-BEM4.45; tr|F8AAC6|F8AAC6_THEID polypeptide sequence
MIRAPWHEYFMLLAKIVALRSGCNSRPSGAVIVKNKRILATGYNGPMPGAWHCTDRGPGYCFRREKGIPDIDKYNFCRATHAEANAIAQAARFGISVEGASLYCTLAPCYVCLKLIASAGIKKVYYEHDYGSRDFERDQFWKEAIKEAGLEKFEQITVSQEVMEQLQEILPYPTSKRRLAPTEFLDEFEDGKKYGVPSIEVLFNKLNYLTRQALKDITFVIEKTTVTEEPEGISFYLSGKMVELSELINTVKKQINADQNFYFLAKHNAIEAKIEILREAENIRLKAFLNECPLESFKRIAESLDYILYQVSNSLSLPTRLELSVNLLRI

SEQ ID NO: 155 - protein, 158 aa, synthetic construct
  REGION 1..158: note = pYY-BEM4.46; tr|A0A2H4ZNK4|A0A2H4ZNK4_9EUKA polypeptide sequence
MKKQLSRKIQEEWMSRLLRNAYDAGTYGEVPIAAVILNESGQCIGWGRNCREKDQNPLGHAEIIALRQASYLKKSWRFNECTMLVTLEPCPMCAGALLQARINHIIYGASDYKRGGFGGVLDLSKNSSAHHKIEITRGVKSIQSCQLLETWFRRRRRV

SEQ ID NO: 156 - protein, 176 aa, synthetic construct
  REGION 1..176: note = pYY-BEM4.47; tr|A0A239N5N1|A0A239N5N1_9PSED polypeptide sequence
MEGRAGIIPFDEGGAAMGPAEEDSPMQHLAYMREALALARANVEAGGRPFGAVLVRDGEVIARAANGTHLDHDPTAHAELLALRAAGRALGSPRLDGCVVYASGHPCPMCLAAMHLSGVSAAYYAYSNADGEPYGLSTAAVYAQMAQPVEWQSLPLQALRPEDEEGLYGFWRERRP

SEQ ID NO: 157 - protein, 199 aa, synthetic construct
  REGION 1..199: note = pYY-BEM4.48; tr|A0A328VTR2|A0A328VTR2_9PSED polypeptide sequence
MHPEHLALLQQAPASTHADDTWARLCCEQALLAVEEGCYAVGALLVDGAGELLCSGRNQVFAPAYASAAHAEMRVLDQLEAEHAQVDRRSLTLYVSLEPCLMCYGRILLAGITRVRYLARDRDGGFALRHGRLPPAWANLASGLSVVQAKADPYWLDLAEHAIGRLQDRQTLRQRVIRAWRGQRTLTDEFSSTKRTHSG

SEQ ID NO: 158 - protein, 402 aa, synthetic construct
  REGION 1..402: note = pYY-BEM4.49; tr|A0A103YG48|A0A103YG48_CYNCS polypeptide sequence
YIRELHASSLRRDEHEIQNPKILVIVDRLSSPSLHVSLSLSLSLVIFPPFIPLNQTPTHMENAKVVEAKDGTIAVASAFSGHQEVVQDRDHKFLTRAVEEAYKGVECGDGGPFGAVVVHKDEVVASCHNMVLKHTDPTAHAEVTAIREACKKLNKIELSDCEIYASCEPCPMCFGAIHLSRIKRLIYGAKAEAAIAIGFDDFIADALRGTGFYQKAHLEIKQADGNGAMIAEQVFEKTKAKFAIDHKFLTRAVEEAYKGVECGDGRPFGALVVHKDEVVVSCHNMVLNYTDPTAHAEITAIREACKKLNRIELSDCEMYSSCEPCPMCFGAIQISRIKRLVYGAKAEASIASGIPIGDFISDALKGTGFHEKANFEIKQADGNGAMIAEQVFERTKAMFPKR

SEQ ID NO: 159 - protein, 195 aa, synthetic construct
  REGION 1..195: note = pYY-BEM4.50; tr|W5M1M8|W5M1M8_LEPOC polypeptide sequence
NSSTRESRVMAQMEINGGASPPKKPGKGQSAADQDMITGLINKALQAKEFAYCPYSNFRVGAALMTNDGRVFTGCNVENACYNLGVCAERTAILKAVSEGYESFRAIAVSSDLQDQFISPCGACRQVMREFGTGWDVFLTKVDGSYVRMTVDELLPMSFGPDDLKKKKVFSLQNGHEVSTQFYTHSPCEAGENNN

SEQ ID NO: 160 - protein, 134 aa, synthetic construct
  REGION 1..134: note = pYY-BEM4.51; tr|A0A3N5YPZ2|A0A3N5YPZ2_9ALTE polypeptide sequence
MSNSETEHIQALVDAAQAAQKQSYSPYSSFQVGAAIFADDGNTYSGCNIENVAYPLGQCAEATAIGMMIMQGAKRIEDIMIASPNDQVCPPCGGCRQKISEFGTAETKIHMVTRSGEVSTVTLGELLPLAFDSL

SEQ ID NO: 161 - protein, 162 aa, synthetic construct
  REGION 1..162: note = pYY-BEM4.52; tr|A0A2A9NC86|A0A2A9NC86_9AGAR polypeptide sequence
MTNSTLSNEDRTRLIQGAFQARKKTYSPYSNFPVGAALLTTDGRIIEGANIENASYGGTICAERTAIVKAVSDGYRHFAGIAVTTKMPTRVSPCGICRQVLREFCSLDMPVLLVPGDYPQRNPVDDDGADKPGVITEGGVRETTLGALLPDSFGPENLPPRA

SEQ ID NO: 162 - protein, 163 aa, synthetic construct
  REGION 1..163: note = pYY-BEM4.53; tr|A0A2D6RD43|A0A2D6RD43_9GAMM polypeptide sequence
MNIENLITENDETLIRRCIELAGESVKNGDKPFGALLAKDGNIIFESSNNAKTKVPYHAEILTLMDAQDKLNTTDLSDYALYSNCEPCPMCSFMIREYKLDKVVFSVHSPYMGGQSRWNILEDDVLTRFKPYFSKPPNVVGGVLESEGKRIFDKVGLWMFGKE

SEQ ID NO: 163 - protein, 204 aa, synthetic construct
  REGION 1..204: note = pYY-BEM4.54; tr|A0A0H3AVL6|A0A0H3AVL6_BRUO2 polypeptide sequence
MHAKGYSQQERRIIPFANRFRFRELCSNKSLHGLRAKFPEQYTKWDPMRKAASITKANSATPMDIALEEAHAAGERGEVPIGAVIVRDGEIIARAGNRTREFNDVTAHAEILTIRQAGEMLGSERLIDCDLYVTLEPCAMCAAAISFARIRRLYYGASDPKGGGIEHGGRFYTQPTCHHAPEIYPGFCEADARKILKDFFREKR

SEQ ID NO: 164 - protein, 165 aa, synthetic construct
  REGION 1..165: note = pYY-BEM4.55; tr|A0A242H531|A0A242H531_9ENTE polypeptide sequence
MFIVKNNIEVIQQQAELDAKFMKQALKLAKDASNNGNEPFGAVLVKNDKVILTGENQIHTESDPTYHAELGIIRDFCTSQKITDLSEYTLYTSCEPCCMCAGAMVWSNLDRMVYGLGHDELAEIAGFNIMIGSEEIFSKSPNRPEVAKGVLKEAAVPVYVDYFQR

SEQ ID NO: 165 - protein, 181 aa, synthetic construct
  REGION 1..181: note = pYY-BEM4.56; tr|A0A2R6XZE2|A0A2R6XZE2_9BACL polypeptide sequence
MSGRISWHEYFMAQAKLIALRATCTRLMVGAVIVRDRRVIAGGYNGSIAGDEHCIDVGCKVRDGHCIRTIHAEQNALMQCAKFGVSTDGAELYVTHFPCLNCTKLLIQAGIRHIYYEVPYRVDPYAIELLEKAGVGTTQITVDLNAYVQVMSKVSTDPALTYVPESKAQKDEYGQSVGKIV

SEQ ID NO: 166 - protein, 173 aa, synthetic construct
  REGION 1..173: note = pYY-BEM4.57; tr|A0A139SHT6|A0A139SHT6_9BACT polypeptide sequence
MSEANASSESLPSRNSPVELIAEAAGKFGRRPTWDEYFMATAVLISTRSSCERLNVGCVIVTAGESHKNRIVAAGYNGHLPGSPHTSRMRDGHEQATVHAEQNAISDAARRGSSVEGCTAYVTHYPCINCAKILASAGIAKICYRLDYHNDPLVKPMLAEAGIEIVQLGEAAS

SEQ ID NO: 167 - protein, 170 aa, synthetic construct
  REGION 1..170: note = pYY-BEM4.58; tr|A0A261DBH2|A0A261DBH2_9RICK polypeptide sequence
MVMKKKLITVKRSTEFNNFFMEEALKQAQFALDKNEIPVGAIIVNRITNKVIAKAHNIVEQTKNPVLHAEIVAINQSCQILSSKNLSDCDMYVTLEPCVMCSGAISFARIGRLFYAANDPKQGAIENGGRFFNSKSCFYRPEIYSGFSAKISENLIKEFFYNVRYQKCNP

SEQ ID NO: 168 - protein, 146 aa, synthetic construct
  REGION 1..146: note = pYY-BEM4.59; tr|A0A2N0XZK6|A0A2N0XZK6_9VIBR polypeptide sequence
MTDNSLHESYMRQAFELSKSALPGCRPNPPVGCVFVKDGEVVSSGFSQPPGNHHAEAGAIAAYTGSYDGLVAYVTLEPCSFQGRTPSCAKALVRVRPEKVYVAILDPDTRNSGAGIKILEDAGIDVEVGLLGEEVASFLNPYLIRN

SEQ ID NO: 169 - protein, 159 aa, synthetic construct
  REGION 1..159: note = pYY-BEM4.60; tr|A0A1V5R0F9|A0A1V5R0F9_9BACT polypeptide sequence
MTKKETTKLHALDDFCMKKALLLAKRAFRADEVPVGALVVDSSNKVIGRGYNQVEKRKSQRAHAEQLAIEQACKKIGDWRLEGCTLYVTLEPCTMCMGLIKLSRIERVVFGAASPLFGYQLDKNRKSQLYKKGVIKIRKGVGKATAAALLKDFFKNKRM

SEQ ID NO: 170 - protein, 167 aa, synthetic construct
  REGION 1..167: note = pYY-BEM4.61; tr|A0A2W0H8Y3|A0A2W0H8Y3_9BACI polypeptide sequence
MKNNGRLDHEYFMTEALQEAKEAGQRGDLPIGAVIVHNGRIIARGSNMRKTAGIKISHAENNAMHNCAPYLMKHASECVIYTTLEPCIMCLTTLVMANIDSIVFAADDKYMNMKPFIDANSYIRDRIHQYKGGVCRGESEALLRKYSPYAAELALNGTHPHHRKGGA

SEQ ID NO: 171 - protein, 165 aa, synthetic construct
  REGION 1..165: note = pYY-BEM4.62; tr|A0A261BDB7|A0A261BDB7_CAERE polypeptide sequence
LYKLYIFRMTTTKANLTQFEQELVDKAVGAMEKAYCKYSGFKVGAALVCEDGEIIIGANHENASYGATICAERSAMVTALTKGHRKFKLLAVATELEAPCSPCGICRQYLIEFGDYKVILGSSTSDQIIETTTYGLLPYAFTPKSLDDHEKEAEERNHQEGEKKH

SEQ ID NO: 172 - protein, 162 aa, synthetic construct
  REGION 1..162: note = pYY-BEM4.63; tr|A0A2E1PHI6|A0A2E1PHI6_9GAMM polypeptide sequence
MKELLIHSWLMLNSNSKLIMERVIELSEINLKNGKIPIAAVIVDKKNYEIISESQNEDSPIGHAELLAITKALKKLNTNRLDSTNLFVTIEPCPMCAYAISKCHINRLYFGSEDEKGGGVINGPRIFESHNLKKIDYVSHCYHEKTTQLMQSFFQLKRNQQL

SEQ ID NO: 173 - protein, 133 aa, synthetic construct
  REGION 1..133: note = pYY-BEM4.64; tr|A0A378LUA7|A0A378LUA7_9GAMM polypeptide sequence
MDTIIKKMISNAHNTLAHSYSPYSKFSVASCICTDKDNFYTGVNVENSAYGLAICAETSAISAMVTAGEKRIKSMVVMAGTNILCSPCGACRQRIYEFSTPDTLIHLCDKNSILRTFKINELLPEAFKFDFNP

SEQ ID NO: 174 - protein, 370 aa, synthetic construct
  REGION 1..370: note = pYY-BEM4.65; tr|A0A139HQ78|A0A139HQ78_9PEZI polypeptide sequence
MADSLKSKPGHARHDTALIHGLSQSDVQKLSESCVDAKSKAYCPYSHFRVGCAVLLANGDVVQGANVENAAYPVGTCAERVALGTAVGAKKGDFRALAVSTDISPPASPCGMCRQFIREFCELNTPILMYDKDGKSVVMTLEQLLPMSFGPDKLLPPGQLENGLMQTQTQSSFVTRAFSTTSSRRQDDTPQVPQSHYDFFPQTFPQGPPPKTSFSPDLKQLRKEFLQLQAKAHPDLAPQDQKRRAEALSMRINEAYKTLQSPLRRAQYLLSQQGIDVEDETAKLDDSSLLMEVMEAREAVEEVEDEEQLNEIRAENNGRIEESVRVLEDAFRDNEFEKAAQEAIRLRYWVNIEESIQGWEKGNGGGILHH

SEQ ID NO: 175 - protein, 165 aa, synthetic construct
  REGION 1..165: note = pYY-BEM4.66; tr|A0A2A9FXV0|A0A2A9FXV0_9VIBR polypeptide sequence
MCNLKENKDMDKYFHFACDATIEGMREGTGGPFGATLTRNGEVVCSVANTVLKDMDISGHAEMVAVREACKKLDTLDLSDCVMYATCEPCPMCVSVMLWAGIKTCYYASTHLDAAKHGFSDQQLRDYLDGSDTSTLNMVHIEDNRDDCAKIWTEFRHLNETKNDG

SEQ ID NO: 176 - protein, 509 aa, synthetic construct
  REGION 1..509: note = pYY-BEM4.67; tr|A0A1A8AG96|A0A1A8AG96_NOTFU polypeptide sequence
MEHSDRWSRAEPGLSTSSRETRDGSTQTDCKLQGHGPRLSKVNLFTLLSLWMELFPQEQDEENGQSQIRRSGLVVVREGKVVGLHCSGADLHAGQAAILQHGASLANCQLFFSRRPCATCLKMIINAGVRQITFWPGDPEISMLTSNQTHSQRTSQSITEASLDATAVEKLKSNSRPQICVLMQPLAPGVLQFVDETSRRSDFMERMMDDDPELDSEKLFNSDRLRHLKDFCRHFLIQTDQRHKDILSQMGLKNFCVEPYFSNLRSNMTELVEVLAAVAAGMPQQHYGFYREESLSLDPHPVDVSQAVARHCIVQARLLSYRTEDPKVGVGAVIWAKGQSACCCGTGRLYLIGCGYNAYPAGSKYAEYPQMDNKQEDRERRKYRYIVHAEQNALTFRTRDIKPDECSMLFVTKCPCDECIPLIRGAGVKHIYTSDQDRDKDKGDISYLRFGSLKGVCKFIWQRSPPVSSASSLHLTNGCVGKHVRQAEQQIYKNKKLCTKGSSGSSDIC

SEQ ID NO: 177 - protein, 148 aa, synthetic construct
  REGION 1..148: note = pYY-BEM4.68; tr|A0A3E2VN88|A0A3E2VN88_9FIRM polypeptide sequence
MEKEITNMDKQKLIQMAVDGLGRSYAPYSHFHVSAALLCADGTVYTGNNIENAAYTPSVCAERCAIFKAVGDGRREFEAIAVCGGPDGVIEDYCPPCGVCRQVMREFCDPSSFRVLVAKTAEDYREYTLEQLLPDGFGPDHLTGSGER

SEQ ID NO: 178 - protein, 221 aa, synthetic construct
  REGION 1..221: note = pYY-BEM4.69; tr|A0A2D5ZRJ2|A0A2D5ZRJ2_9BACT polypeptide sequence
MARPVHLHTGERRTEEGATESRAVAAVATAITRAPRAPPRPATGRERDGPPPRRVFGGGLRVGDPSGYDRGESKPIGGPLTEKRSDWHSYFMRIAGEVATRATCDRKHVGAVIVRNRTILSTGYNGSIRGMPHCDDVGHDMVDGHCIATIHAEANAILQAARNGVMIQDGSIYITASPCWNCFKLVANAGLKRVYYGEFYRDKRSFEVARRLGIDLMHIEV

SEQ ID NO: 179 - protein, 155 aa, synthetic construct
  REGION 1..155: note = pYY-BEM4.70; tr|A0A1B8WPS3|A0A1B8WPS3_9BACI polypeptide sequence
MEGVQLIYQFQWGNLIMTVNKEDLYLIDVARNTIKTLYVDGKHHVGAAVRTKTGKIYSAVHLEANIGRVSVCAEAIALGKAISEGESEFDTIVAVRHPDPTQENQKIEVVSPCGICRELISDYGKGTNVILKNKEGYIKTVISDLLPNKYIREDN

SEQ ID NO: 180 - protein, 156 aa, synthetic construct
  REGION 1..156: note = pYY-BEM4.71; tr|A0A1W5ZQK9|A0A1W5ZQK9_9BACI polypeptide sequence
MNRFMERAVSLAAENVRVGGQPFGAVLVKDDELVAEGVNEMHLNYDVSGHAELLAIRRAQGELQTHDLSGYTMYASGEPCPMCLSAMYFAGIKDVFYCATVEEAAQVGLEKSKNVYDDLQKSKGERSLVMKQMPLEDDQEDPMKLWDERTNHNGTS

SEQ ID NO: 181 - protein, 340 aa, synthetic construct
  REGION 1..340: note = pYY-BEM4.72; tr|A0A378V0W4|A0A378V0W4_MYCFO polypeptide sequence
MVHAQFDPTARQALAATAVEAKTRKDLTWQQIADAAELSPAFVTAAVLGQHALPARSAEAVAALLGLDDDAALLLQTIPIRGSIPGGIPTDPTIYRFYEMLQVYGTTLKALVHEQFGDGIISAINFKLDVRKVADPEGGERAVITLDGKYLPPNPFDRVRYRGGLMDFAQRTIDIARQNVAEGGRPFATVIVKNGEILAESPNLVAQTHDPTAHAEILAIRKACTRIGTEHLIGATIYVLAQPCPMCLGSLYYCSPDEVVFLTTRDAYEPHYVDDRKYFELNMFYDEFAKPWDQRRLPMRYEPRDAAVDVYKLWQERNGGERRVPGAPTSTRPGKNPRGE

SEQ ID NO: 182 - protein, 157 aa, synthetic construct
  REGION 1..157: note = pYY-BEM4.73; tr|I3XF03|I3XF03_RHIFR polypeptide sequence
MKQRCMSPKSAQRFWDNDMHNNKDRPMSENELFVAAREAMAKAHAPYSKFPVGAAIRAEDGQIYTGANIENLSFPEGWCAETTAISHMVMAGQRKIMEVAVIAEKLALCPPCGGCRQRLAEFSGASTRIYLCDETGIKKSLALSDLLPHSFETEILG

SEQ ID NO: 183 - protein, 595 aa, synthetic construct
  REGION 1..595: note = pYY-BEM4.74; tr|F8IEF3|F8IEF3_ALIAT polypeptide sequence
MDAKELETRGWLCMRAVDVIDKKRRGEALAEEELRFLIEGYVAGRIPDYQMSAFLMAVVWRGMTREETLVLTRLLADSGERLDLSGIPGVKVDKHSTGGVGDKATLVVLPLVASIGVPVIKMSGRGLGHTGGTIDKLESIPGFRTDLSVAELVAQVRQVGIALGGQTADLAPADKKLYALRDVTGTVESLPLIASSVMSKKLAGGADAIVLDVKVGDGAFMKSRSDARRLARLMVEIGEAAGRRTVAVLSNMDQPLGCAIGNALEVAEAIRVLSGEGPFDLAEIALALAEEMTVLAGVAATREEARRMLRQSVAEGRALETLRRWIAAQGGDPAVVDDPSRLPQAPVQMPYLPKKAGFVAKLSALAFGLAAMRLGAGRETKEEAIDPSVGIVLHAKVGDRVQTHRPMFTVHARTGEDALRCIQELEAAIQISDDPVEAPPLILARIDRSEALPYADLMDAAREARDRAYVPYSGFAVGAALELADGRMVTGANVENASYGLTNCAERSAVFRAVAEGGPGTKPEIRAVAVIADSPEPVSPCGACRQVLAEFCSPDTPVYLGNLQGDVRETTVGALLPGAFTDAQMANVRRQDKEA

SEQ ID NO: 184 - protein, 153 aa, synthetic construct
  REGION 1..153: note = pYY-BEM4.75; tr|A0A1G3M638|A0A1G3M638_9SPIR polypeptide sequence
MKTTNINALDKWDLRFLQMAEHVAEWSKDPSTKVGAVIVRPDRTIASVGFNGFARGVRDTVERLWNRELKYPLTVHAELNAILSAHEPVRGHSLYVSPLSPCSNCAGVIIQSGIARVVAKCGQVNNPAQWSESFNLALTAFAEAGVSVILVEH

SEQ ID NO: 185 - protein, 177 aa, synthetic construct
  REGION 1..177: note = pYY-BEM4.76; tr|A0A3D9LFR2|A0A3D9LFR2_9MICC polypeptide sequence
MEQNDHGSSGAFSDPFEDDIPLTASLPRITGTGSGIDWQRLESTARAAMTRAYVPYSRFPVGAAALVEDGRVVAGCNIENASLGLTLCAECSLVSNLQMSGGGRIVAFYCVDGNGEVLMPCGRCRQLLYEFHAPGMRLMGPDGELTMDEVLPLAFGPADMTHLSDSAASTDDPGRTR

SEQ ID NO: 186 - protein, 172 aa, synthetic construct
  REGION 1..172: note = pYY-BEM4.77; tr|A0A3B9YGB5|A0A3B9YGB5_9BACT polypeptide sequence
MAKPISKKYRKLIETAKAARKKAYSPYSRYQVGAAVLTESGRIYSGANMENASYGLCMCAERVAIANAVTRGEKVLQAVCVVGKKARPCGACRQVMLEFSTKETELLMVDIDPNARRDTVIRTRVYSMLPNPFDPFESGMLPQHPQNLLRRRKSPQPRRKRRSRPVHREVSR

SEQ ID NO: 187 - protein, 391 aa, synthetic construct
  REGION 1..391: note = pYY-BEM4.78; tr|A0A182F569|A0A182F569_ANOAL polypeptide sequence
MPRPSQFRVSSSQSLSNSQIQASQSSDSVVDITSYVNAVVKALLNLSCTKTIIKRADLVNIALKGNGRLIGRVLQDANIELKEIYGYELIEVEKSKTMILCSTLAAGSMDELNDANRRRYTFLYLILGYIFMKNGSVPETIVWEFLETLGIEEQQEHNYFGDVRKLYDSLFKQAYLTRTKQALEGLNDDVMLISWGVRSKHEVSKKDILAGFCKVMNRDPVDFKAQYIEANEKDDKMNNNINGTVDGRNTVEYSSLDASVKELIEAAIKVRNNAYCPYSNFAVGAALRTVGGDIVTGCNVENGTFGPSVCAERTAVCKAVSEGHREFTAVAVVAFQETEFTAPCGTCRQTLSEFSRKDIPIYLVKPSPVRVMVTSLFQLLPHAFSPSFLNK

SEQ ID NO: 188 - protein, 151 aa, synthetic construct
  REGION 1..151: note = pYY-BEM4.79; tr|A0A264Z0D4|A0A264Z0D4_9BACI polypeptide sequence
MEPKKLIEEAIVASKQAYVQYSNFHVGAALLTKDGKLYHGCNIENASYGLTNCAERTAIFKAVSEGEKEFQAIAVVGDTEGPISPCGACRQVLAEFFSPDTVVILANLKGDHVVTNINELLPGFFSSKDLQKKVKNCFEKNALGSSCLRPI

SEQ ID NO: 189 - protein, 229 aa, synthetic construct
  REGION 1..229: note = pYY-BEM4.80; tr|A0A1L9Q1R3|A0A1L9Q1R3_ASPVE polypeptide sequence
MPLSAEEAALVETATATINSIPLSEDYSVASAAKASDGRVFTGVNVYHFTGGPCAELVVLGVAAAAGAAQLTHIVAVANEQRGILSPCGRCRQVLLDLQPNIQVIVGKEGSEQSVPVAQLLPFSYRQPDQHTPVIFKALTSSGPVVVDFFATWCGPCKAVAPVVGKLSETYTDVRFIQVDVDKARSISQEHDIRAMPTFVLYKDGKLLDKRVVGGNMKELEEQIKAIIA

SEQ ID NO: 190 - protein, 18 aa, synthetic construct
  REGION 1..18: note = synthetic peptide
KRTADGSEFESPKKKRKV

SEQ ID NO: 191 - protein, 16 aa, synthetic construct
  REGION 1..16: note = synthetic peptide
KRPAATKKAGQAKKKK

SEQ ID NO: 192 - protein, 17 aa, synthetic construct
  REGION 1..17: note = synthetic peptide
KKTELQTTNAENKTKKL

SEQ ID NO: 193 - protein, 19 aa, synthetic construct
  REGION 1..19: note = synthetic peptide
KRGINDRNFWRGENGRKTR

SEQ ID NO: 194 - protein, 16 aa, synthetic construct
  REGION 1..16: note = synthetic peptide
RKSGKIAAIVVKRPRK

SEQ ID NO: 195 - protein, 7 aa, synthetic construct
  REGION 1..7: note = synthetic peptide
PKKKRKV

SEQ ID NO: 196 - protein, 30 aa, synthetic construct
  REGION 1..30: note = synthetic polypeptide
MDSLLMNRRKFLYQFKNVRWAKGRRETYLC

SEQ ID NO: 197 - protein, 1368 aa, Streptococcus pyogenes [sequence omitted]

SEQ ID NO: 198 - DNA, 4104 bp, Streptococcus pyogenes
  misc_feature 1..4104: note = wild type spCas9 polynucleotide sequence
  source 1..4104: mol_type = genomic DNA
atggataagaaatactcaataggcttagatatcggcacaaatagcgtcggatgggcggtgatcactgatgattataaggttccgtctaaaaagttcaaggttctgggaaatacagaccgccacagtatcaaaaaaaatcttataggggctcttttatttggcagtggagagacagcggaagcgactcgtctcaaacggacagctcgtagaaggtatacacgtcggaagaatcgtatttgttatctacaggagattttttcaaatgagatggcgaaagtagatgatagtttctttcatcgacttgaagagtcttttttggtggaagaagacaagaagcatgaacgtcatcctatttttggaaatatagtagatgaagttgcttatcatgagaaatatccaactatctatcatctgcgaaaaaaattggcagattctactgataaagcggatttgcgcttaatctatttggccttagcgcatatgattaagtttcgtggtcattttttgattgagggagatttaaatcctgataatagtgatgtggacaaactatttatccagttggtacaaatctacaatcaattatttgaagaaaaccctattaacgcaagtagagtagatgctaaagcgattctttctgcacgattgagtaaatcaagacgattagaaaatctcattgctcagctccccggtgagaagagaaatggcttgtttgggaatctcattgctttgtcattgggattgacccctaattttaaatcaaattttgatttggcagaagatgctaaattacagctttcaaaagatacttacgatgatgatttagataatttattggcgcaaattggagatcaatatgctgatttgtttttggcagctaagaatttatcagatgctattttactttcagatatcctaagagtaaatagtgaaataactaaggctcccctatcagcttcaatgattaagcgctacgatgaacatcatcaagacttgactcttttaaaagctttagttcgacaacaacttccagaaaagtataaagaaatcttttttgatcaatcaaaaaacggatatgcaggttatattgatgggggagctagccaagaagaattttataaatttatcaaaccaattttagaaaaaatggatggtactgaggaattattggtgaaactaaatcgtgaagatttgctgcgcaagcaacggacctttgacaacggctctattccccatcaaattcacttgggtgagctgcatgctattttgagaagacaagaagacttttatccatttttaaaagacaatcgtgagaagattgaaaaaatcttgacttttcgaattccttattatgttggtccattggcgcgtggcaatagtcgttttgcatggatgactcggaagtctgaagaaacaattaccccatggaattttgaagaagttgtcgataaaggtgcttcagctcaatcatttattgaacgcatgacaaactttgataaaaatcttccaaatgaaaaagtactaccaaaacatagtttgctttatgagtattttacggtttataacgaattgacaaaggtcaaatatgttactgagggaatgcgaaaaccagcatttctttcaggtgaacagaagaaagccattgttgatttactcttcaaaacaaatcgaaaagtaaccgttaagcaattaaaagaagattatttcaaaaaaatagaatgttttgatagtgttgaaatttcaggagttgaagatagatttaatgcttcattaggcgcctaccatgatttgctaaaaattattaaagataaagattttttggataatgaagaaaatgaagatatcttagaggatattgttttaacattgaccttatttgaagatagggggatgattgaggaaagacttaaaacatatgctcacctctttgatgataaggtgatgaaacagcttaaacgtcgccgttatactggttggggacgtttgtctcgaaaattgattaatggtattagggataagcaatctggcaaaacaatattagattttttgaaatcagatggttttgccaatcgcaattttatgcagctgatccatgatgatagtttgacatttaaagaagatattcaaaaagcacaggtgtctggacaaggccatagtttacatgaacagattgctaacttagctggcagtcctgctattaaaaaaggtattttacagactgtaaaaattgttgatgaactggtcaaagtaatggggcataagccagaaaatatcgttattgaaatggcacgtgaaaatcagacaactcaaaagggccagaaaaattcgcgagagcgtatgaaacgaatcgaagaaggtatcaaagaattaggaagtcagattcttaaagagcatcctgttgaaaatactcaattgcaaaatgaaaagctctatctctattatctacaaaatggaagagacatgtatgtggaccaagaattagatattaatcgtttaagtgattatgatgtcgatcacattgttccacaaagtttcattaaagacgattcaatagacaataaggtactaacgcgttctgataaaaatcgtggtaaatcggataacgttccaagtgaagaagtagtcaaaaagatgaaaaactattggagacaacttctaaacgccaagttaatcactcaacgtaagtttgataatttaacgaaagctgaacgtggaggtttgagtgaacttgataaagctggttttatcaaacgccaattggttgaaactcgccaaatcactaagcatgtggcacaaattttggatagtcgcatgaatactaaatacgatgaaaatgataaacttattcgagaggttaaagtgattaccttaaaatctaaattagtttctgacttccgaaaagatttccaattctataaagtacgtgagattaacaattaccatcatgcccatgatgcgtatctaaatgccgtcgttggaactgctttgattaagaaatatccaaaacttgaatcggagtttgtctatggtgattataaagtttatgatgttcgtaaaatgattgctaagtctgagcaagaaataggcaaagcaaccgcaaaatatttcttttactctaatatcatgaacttcttcaaaacagaaattacacttgcaaatggagagattcgcaaacgccctctaatcgaaactaatggggaaactggagaaattgtctgggataaagggcgagattttgccacagtgcgcaaagtattgtccatgccccaagtcaatattgtcaagaaaacagaagtacagacaggcggattctccaaggagtcaattttaccaaaaagaaattcggacaagcttattgctcgtaaaaaagactgggatccaaaaaaatatggtggttttgatagtccaacggtagcttattcagtcctagtggttgctaaggtggaaaaagggaaatcgaagaagttaaaatccgttaaagagttactagggatcacaattatggaaagaagttcctttgaaaaaaatccgattgactttttagaagctaaaggatataaggaagttaaaaaagacttaatcattaaactacctaaatatagtctttttgagttagaaaacggtcgtaaacggatgctggctagtgccggagaattacaaaaaggaaatgagctggctctgccaagcaaatatgtgaattttttatatttagctagtcattatgaaaagttgaagggtagtccagaagataacgaacaaaaacaattgtttgtggagcagcataagcattatttagatgagattattgagcaaatcagtgaattttctaagcgtgttattttagcagatgccaatttagataaagttcttagtgcatataacaaacatagagacaaaccaatacgtgaacaagcagaaaatattattcatttatttacgttgacgaatcttggagctcccgctgcttttaaatattttgatacaacaattgatcgtaaacgatatacgtctacaaaagaagttttagatgccactcttatccatcaatccatcactggtctttatgaaacacgcattgatttgagtcagctaggaggtgactga

SEQ ID NO: 199 - protein, 1367 aa, Streptococcus pyogenes
  REGION 1..1367: note = MISC_FEATURE - spCas9 polypeptide sequence
MDKKYSIGLDIGTNSVGWAVITDDYKVPSKKFKVLGNTDRHSIKKNLIGALLFGSGETAEATRLKRTARRRYTRRKNRICYLQEIFSNEMAKVDDSFFHRLEESFLVEEDKKHERHPIFGNIVDEVAYHEKYPTIYHLRKKLADSTDKADLRLIYLALAHMIKFRGHFLIEGDLNPDNSDVDKLFIQLVQIYNQLFEENPINASRVDAKAILSARLSKSRRLENLIAQLPGEKRNGLFGNLIALSLGLTPNFKSNFDLAEDAKLQLSKDTYDDDLDNLLAQIGDQYADLFLAAKNLSDAILLSDILRVNSEITKAPLSASMIKRYDEHHQDLTLLKALVRQQLPEKYKEIFFDQSKNGYAGYIDGGASQEEFYKFIKPILEKMDGTEELLVKLNREDLLRKQRTFDNGSIPHQIHLGELHAILRRQEDFYPFLKDNREKIEKILTFRIPYYVGPLARGNSRFAWMTRKSEETITPWNFEEVVDKGASAQSFIERMTNFDKNLPNEKVLPKHSLLYEYFTVYNELTKVKYVTEGMRKPAFLSGEQKKAIVDLLFKTNRKVTVKQLKEDYFKKIECFDSVEISGVEDRFNASLGAYHDLLKIIKDKDFLDNEENEDILEDIVLTLTLFEDRGMIEERLKTYAHLFDDKVMKQLKRRRYTGWGRLSRKLINGIRDKQSGKTILDFLKSDGFANRNFMQLIHDDSLTFKEDIQKAQVSGQGHSLHEQIANLAGSPAIKKGILQTVKIVDELVKVMGHKPENIVIEMARENQTTQKGQKNSRERMKRIEEGIKELGSQILKEHPVENTQLQNEKLYLYYLQNGRDMYVDQELDINRLSDYDVDHIVPQSFIKDDSIDNKVLTRSDKNRGKSDNVPSEEVVKKMKNYWRQLLNAKLITQRKFDNLTKAERGGLSELDKAGFIKRQLVETRQITKHVAQILDSRMNTKYDENDKLIREVKVITLKSKLVSDFRKDFQFYKVREINNYHHAHDAYLNAVVGTALIKKYPKLESEFVYGDYKVYDVRKMIAKSEQEIGKATAKYFFYSNIMNFFKTEITLANGEIRKRPLIETNGETGEIVWDKGRDFATVRKVLSMPQVNIVKKTEVQTGGFSKESILPKRNSDKLIARKKDWDPKKYGGFDSPTVAYSVLVVAKVEKGKSKKLKSVKELLGITIMERSSFEKNPIDFLEAKGYKEVKKDLIIKLPKYSLFELENGRKRMLASAGELQKGNELALPSKYVNFLYLASHYEKLKGSPEDNEQKQLFVEQHKHYLDEIIEQISEFSKRVILADANLDKVLSAYNKHRDKPIREQAENIIHLFTLTNLGAPAAFKYFDTTIDRKRYTSTKEVLDATLIHQSITGLYETRIDLSQLGGD

SEQ ID NO: 200 - DNA, 4212 bp, synthetic construct
  misc_feature 1..4212: note = wild-type Cas9 polynucleotide sequence
  misc_feature 5..58: note = RuvC domain
  misc_feature 718..764: note = RuvC domain
  misc_feature 772..901: note = HNH domain
  misc_feature 906..1101: note = RuvC domain
  source 1..4212: mol_type = other DNA
atggataaaaagtattctattggtttagacatcggcactaattccgttggatgggctgtcataaccgatgaatacaaagtaccttcaaagaaatttaaggtgttggggaacacagaccgtcattcgattaaaaagaatcttatcggtgccctcctattcgatagtggcgaaacggcagaggcgactcgcctgaaacgaaccgctcggagaaggtatacacgtcgcaagaaccgaatatgttacttacaagaaatttttagcaatgagatggccaaagttgacgattctttctttcaccgtttggaagagtccttccttgtcgaagaggacaagaaacatgaacggcaccccatctttggaaacatagtagatgaggtggcatatcatgaaaagtacccaacgatttatcacctcagaaaaaagctagttgactcaactgataaagcggacctgaggttaatctacttggctcttgcccatatgataaagttccgtgggcactttctcattgagggtgatctaaatccggacaactcggatgtcgacaaactgttcatccagttagtacaaacctataatcagttgtttgaagagaaccctataaatgcaagtggcgtggatgcgaaggctattcttagcgcccgcctctctaaatcccgacggctagaaaacctgatcgcacaattacccggagagaagaaaaatgggttgttcggtaaccttatagcgctctcactaggcctgacaccaaattttaagtcgaacttcgacttagctgaagatgccaaattgcagcttagtaaggacacgtacgatgacgatctcgacaatctactggcacaaattggagatcagtatgcggacttatttttggctgccaaaaaccttagcgatgcaatcctcctatctgacatactgagagttaatactgagattaccaaggcgccgttatccgcttcaatgatcaaaaggtacgatgaacatcaccaagacttgacacttctcaaggccctagtccgtcagcaactgcctgagaaatataaggaaatattctttgatcagtcgaaaaacgggtacgcaggttatattgacggcggagcgagtcaagaggaattctacaagtttatcaaacccatattagagaagatggatgggacggaagagttgcttgtaaaactcaatcgcgaagatctactgcgaaagcagcggactttcgacaacggtagcattccacatcaaatccacttaggcgaattgcatgctatacttagaaggcaggaggatttttatccgttcctcaaagacaatcgtgaaaagattgagaaaatcctaacctttcgcataccttactatgtgggacccctggcccgagggaactctcggttcgcatggatgacaagaaagtccgaagaaacgattactccatggaattttgaggaagttgtcgataaaggtgcgtcagctcaatcgttcatcgagaggatgaccaactttgacaagaatttaccgaacgaaaaagtattgcctaagcacagtttactttacgagtatttcacagtgtacaatgaactcacgaaagttaagtatgtcactgagggcatgcgtaaacccgcctttctaagcggagaacagaagaaagcaatagtagatctgttattcaagaccaaccgcaaagtgacagttaagcaattgaaagaggactactttaagaaaattgaatgcttcgattctgtcgagatctccggggtagaagatcgatttaatgcgtcacttggtacgtatcatgacctcctaaagataattaaagataaggacttcctggataacgaagagaatgaagatatcttagaagatatagtgttgactcttaccctctttgaagatcgggaaatgattgaggaaagactaaaaacatacgctcacctgttcgacgataaggttatgaaacagttaaagaggcgtcgctatacgggctggggacgattgtcgcggaaacttatcaacgggataagagacaagcaaagtggtaaaactattctcgattttctaaagagcgacggcttcgccaataggaactttatgcagctgatccatgatgactctttaaccttcaaagaggatatacaaaaggcacaggtttccggacaaggggactcattgcacgaacatattgcgaatcttgctggttcgccagccatcaaaaagggcatactccagacagtcaaagtagtggatgagctagttaaggtcatgggacgtcacaaaccggaaaacattgtaatcgagatggcacgcgaaaatcaaacgactcagaaggggcaaaaaaacagtcgagagcggatgaagagaatagaagagggtattaaagaactgggcagccagatcttaaaggagcatcctgtggaaaatacccaattgcagaacgagaaactttacctctattacctacaaaatggaagggacatgtatgttgatcaggaactggacataaaccgtttatctgattacgacgtcgatcacattgtaccccaatcctttttgaaggacgattcaatcgacaataaagtgcttacacgctcggataagaaccgagggaaaagtgacaatgttccaagcgaggaagtcgtaaagaaaatgaagaactattggcggcagctcctaaatgcgaaactgataacgcaaagaaagttcgataacttaactaaagctgagaggggtggcttgtctgaacttgacaaggccggatttattaaacgtcagctcgtggaaacccgccaaatcacaaagcatgttgcacagatactagattcccgaatgaatacgaaatacgacgagaacgataagctgattcgggaagtcaaagtaatcactttaaagtcaaaattggtgtcggacttcagaaaggattttcaattctataaagttagggagataaataactaccaccatgcgcacgacgcttatcttaatgccgtcgtagggaccgcactcattaagaaatacccgaagctagaaagtgagtttgtgtatggtgattacaaagtttatgacgtccgtaagatgatcgcgaaaagcgaacaggagataggcaaggctacagccaaatacttcttttattctaacattatgaatttctttaagacggaaatcactctggcaaacggagagatacgcaaacgacctttaattgaaaccaatggggagacaggtgaaatcgtatgggataagggccgggacttcgcgacggtgagaaaagttttgtccatgccccaagtcaacatagtaaagaaaactgaggtgcagaccggagggttttcaaaggaatcgattcttccaaaaaggaatagtgataagctcatcgctcgtaaaaaggactgggacccgaaaaagtacggtggcttcgatagccctacagttgcctattctgtcctagtagtggcaaaagttgagaagggaaaatccaagaaactgaagtcagtcaaagaattattggggataacgattatggagcgctcgtcttttgaaaagaaccccatcgacttccttgaggcgaaaggttacaaggaagtaaaaaaggatctcataattaaactaccaaagtatagtctgtttgagttagaaaatggccgaaaacggatgttggctagcgccggagagcttcaaaaggggaacgaactcgcactaccgtctaaatacgtgaatttcctgtatttagcgtcccattacgagaagttgaaaggttcacctgaagataacgaacagaagcaactttttgttgagcagcacaaacattatctcgacgaaatcatagagcaaatttcggaattcagtaagagagtcatcctagctgatgccaatctggacaaagtattaagcgcatacaacaagcacagggataaacccatacgtgagcaggcggaaaatattatccatttgtttactcttaccaacctcggcgctccagccgcattcaagtattttgacacaacgatagatcgcaaacgatacacttctaccaaggaggtgctagacgcgacactgattcaccaatccatcacgggattatatgaaactcggatagatttgtcacagcttgggggtgacggatcccccaagaagaagaggaaagtctcgagcgactacaaagaccatgacggtgattataaagatcatgacatcgattacaaggatgacgatgacaaggctgcagga

SEQ ID NO: 201 - protein, 1368 aa, synthetic construct
  REGION 1..1368: note = exemplary catalytically active Cas9 nickase (nCas9) polypeptide sequence
MDKKYSIGLAIGTNSVGWAVITDEYKVPSKKFKVLGNTDRHSIKKNLIGALLFDSGETAEATRLKRTARRRYTRRKNRICYLQEIFSNEMAKVDDSFFHRLEESFLVEEDKKHERHPIFGNIVDEVAYHEKYPTIYHLRKKLVDSTDKADLRLIYLALAHMIKFRGHFLIEGDLNPDNSDVDKLFIQLVQTYNQLFEENPINASGVDAKAILSARLSKSRRLENLIAQLPGEKKNGLFGNLIALSLGLTPNFKSNFDLAEDAKLQLSKDTYDDDLDNLLAQIGDQYADLFLAAKNLSDAILLSDILRVNTEITKAPLSASMIKRYDEHHQDLTLLKALVRQQLPEKYKEIFFDQSKNGYAGYIDGGASQEEFYKFIKPILEKMDGTEELLVKLNREDLLRKQRTFDNGSIPHQIHLGELHAILRRQEDFYPFLKDNREKIEKILTFRIPYYVGPLARGNSRFAWMTRKSEETITPWNFEEVVDKGASAQSFIERMTNFDKNLPNEKVLPKHSLLYEYFTVYNELTKVKYVTEGMRKPAFLSGEQKKAIVDLLFKTNRKVTVKQLKEDYFKKIECFDSVEISGVEDRFNASLGTYHDLLKIIKDKDFLDNEENEDILEDIVLTLTLFEDREMIEERLKTYAHLFDDKVMKQLKRRRYTGWGRLSRKLINGIRDKQSGKTILDFLKSDGFANRNFMQLIHDDSLTFKEDIQKAQVSGQGDSLHEHIANLAGSPAIKKGILQTVKVVDELVKVMGRHKPENIVIEMARENQTTQKGQKNSRERMKRIEEGIKELGSQILKEHPVENTQLQNEKLYLYYLQNGRDMYVDQELDINRLSDYDVDHIVPQSFLKDDSIDNKVLTRSDKNRGKSDNVPSEEVVKKMKNYWRQLLNAKLITQRKFDNLTKAERGGLSELDKAGFIKRQLVETRQITKHVAQILDSRMNTKYDENDKLIREVKVITLKSKLVSDFRKDFQFYKVREINNYHHAHDAYLNAVVGTALIKKYPKLESEFVYGDYKVYDVRKMIAKSEQEIGKATAKYFFYSNIMNFFKTEITLANGEIRKRPLIETNGETGEIVWDKGRDFATVRKVLSMPQVNIVKKTEVQTGGFSKESILPKRNSDKLIARKKDWDPKKYGGFDSPTVAYSVLVVAKVEKGKSKKLKSVKELLGITIMERSSFEKNPIDFLEAKGYKEVKKDLIIKLPKYSLFELENGRKRMLASAGELQKGNELALPSKYVNFLYLASHYEKLKGSPEDNEQKQLFVEQHKHYLDEIIEQISEFSKRVILADANLDKVLSAYNKHRDKPIREQAENIIHLFTLTNLGAPAAFKYFDTTIDRKRYTSTKEVLDATLIHQSITGLYETRIDLSQLGGD

SEQ ID NO: 202 - DNA, 4107 bp, Streptococcus pyogenes
  misc_feature 1..4107: note = Cas9 from Streptococcus pyogenes (NCBI Ref. Seq.: NC_002737.2)polynucleotide sequence
  source 1..4107: mol_type = genomic DNA
atggataagaaatactcaataggcttagatatcggcacaaatagcgtcggatgggcggtgatcactgatgaatataaggttccgtctaaaaagttcaaggttctgggaaatacagaccgccacagtatcaaaaaaaatcttataggggctcttttatttgacagtggagagacagcggaagcgactcgtctcaaacggacagctcgtagaaggtatacacgtcggaagaatcgtatttgttatctacaggagattttttcaaatgagatggcgaaagtagatgatagtttctttcatcgacttgaagagtcttttttggtggaagaagacaagaagcatgaacgtcatcctatttttggaaatatagtagatgaagttgcttatcatgagaaatatccaactatctatcatctgcgaaaaaaattggtagattctactgataaagcggatttgcgcttaatctatttggccttagcgcatatgattaagtttcgtggtcattttttgattgagggagatttaaatcctgataatagtgatgtggacaaactatttatccagttggtacaaacctacaatcaattatttgaagaaaaccctattaacgcaagtggagtagatgctaaagcgattctttctgcacgattgagtaaatcaagacgattagaaaatctcattgctcagctccccggtgagaagaaaaatggcttatttgggaatctcattgctttgtcattgggtttgacccctaattttaaatcaaattttgatttggcagaagatgctaaattacagctttcaaaagatacttacgatgatgatttagataatttattggcgcaaattggagatcaatatgctgatttgtttttggcagctaagaatttatcagatgctattttactttcagatatcctaagagtaaatactgaaataactaaggctcccctatcagcttcaatgattaaacgctacgatgaacatcatcaagacttgactcttttaaaagctttagttcgacaacaacttccagaaaagtataaagaaatcttttttgatcaatcaaaaaacggatatgcaggttatattgatgggggagctagccaagaagaattttataaatttatcaaaccaattttagaaaaaatggatggtactgaggaattattggtgaaactaaatcgtgaagatttgctgcgcaagcaacggacctttgacaacggctctattccccatcaaattcacttgggtgagctgcatgctattttgagaagacaagaagacttttatccatttttaaaagacaatcgtgagaagattgaaaaaatcttgacttttcgaattccttattatgttggtccattggcgcgtggcaatagtcgttttgcatggatgactcggaagtctgaagaaacaattaccccatggaattttgaagaagttgtcgataaaggtgcttcagctcaatcatttattgaacgcatgacaaactttgataaaaatcttccaaatgaaaaagtactaccaaaacatagtttgctttatgagtattttacggtttataacgaattgacaaaggtcaaatatgttactgaaggaatgcgaaaaccagcatttctttcaggtgaacagaagaaagccattgttgatttactcttcaaaacaaatcgaaaagtaaccgttaagcaattaaaagaagattatttcaaaaaaatagaatgttttgatagtgttgaaatttcaggagttgaagatagatttaatgcttcattaggtacctaccatgatttgctaaaaattattaaagataaagattttttggataatgaagaaaatgaagatatcttagaggatattgttttaacattgaccttatttgaagatagggagatgattgaggaaagacttaaaacatatgctcacctctttgatgataaggtgatgaaacagcttaaacgtcgccgttatactggttggggacgtttgtctcgaaaattgattaatggtattagggataagcaatctggcaaaacaatattagattttttgaaatcagatggttttgccaatcgcaattttatgcagctgatccatgatgatagtttgacatttaaagaagacattcaaaaagcacaagtgtctggacaaggcgatagtttacatgaacatattgcaaatttagctggtagccctgctattaaaaaaggtattttacagactgtaaaagttgttgatgaattggtcaaagtaatggggcggcataagccagaaaatatcgttattgaaatggcacgtgaaaatcagacaactcaaaagggccagaaaaattcgcgagagcgtatgaaacgaatcgaagaaggtatcaaagaattaggaagtcagattcttaaagagcatcctgttgaaaatactcaattgcaaaatgaaaagctctatctctattatctccaaaatggaagagacatgtatgtggaccaagaattagatattaatcgtttaagtgattatgatgtcgatcacattgttccacaaagtttccttaaagacgattcaatagacaataaggtcttaacgcgttctgataaaaatcgtggtaaatcggataacgttccaagtgaagaagtagtcaaaaagatgaaaaactattggagacaacttctaaacgccaagttaatcactcaacgtaagtttgataatttaacgaaagctgaacgtggaggtttgagtgaacttgataaagctggttttatcaaacgccaattggttgaaactcgccaaatcactaagcatgtggcacaaattttggatagtcgcatgaatactaaatacgatgaaaatgataaacttattcgagaggttaaagtgattaccttaaaatctaaattagtttctgacttccgaaaagatttccaattctataaagtacgtgagattaacaattaccatcatgcccatgatgcgtatctaaatgccgtcgttggaactgctttgattaagaaatatccaaaacttgaatcggagtttgtctatggtgattataaagtttatgatgttcgtaaaatgattgctaagtctgagcaagaaataggcaaagcaaccgcaaaatatttcttttactctaatatcatgaacttcttcaaaacagaaattacacttgcaaatggagagattcgcaaacgccctctaatcgaaactaatggggaaactggagaaattgtctgggataaagggcgagattttgccacagtgcgcaaagtattgtccatgccccaagtcaatattgtcaagaaaacagaagtacagacaggcggattctccaaggagtcaattttaccaaaaagaaattcggacaagcttattgctcgtaaaaaagactgggatccaaaaaaatatggtggttttgatagtccaacggtagcttattcagtcctagtggttgctaaggtggaaaaagggaaatcgaagaagttaaaatccgttaaagagttactagggatcacaattatggaaagaagttcctttgaaaaaaatccgattgactttttagaagctaaaggatataaggaagttaaaaaagacttaatcattaaactacctaaatatagtctttttgagttagaaaacggtcgtaaacggatgctggctagtgccggagaattacaaaaaggaaatgagctggctctgccaagcaaatatgtgaattttttatatttagctagtcattatgaaaagttgaagggtagtccagaagataacgaacaaaaacaattgtttgtggagcagcataagcattatttagatgagattattgagcaaatcagtgaattttctaagcgtgttattttagcagatgccaatttagataaagttcttagtgcatataacaaacatagagacaaaccaatacgtgaacaagcagaaaatattattcatttatttacgttgacgaatcttggagctcccgctgcttttaaatattttgatacaacaattgatcgtaaacgatatacgtctacaaaagaagttttagatgccactcttatccatcaatccatcactggtctttatgaaacacgcattgatttgagtcagctaggaggtgactga

SEQ ID NO: 203 - protein, 1368 aa, synthetic construct
  REGION 1..1368: note = catalytically inactive Cas9 (dCas9)polypeptide sequence
  REGION 5..58: note = MISC_FEATURE - RuvC domain
  REGION 718..764: note = MISC_FEATURE - RuvC domain
  REGION 773..902: note = MISC_FEATURE - HNH domain
  REGION 907..1102: note = MISC_FEATURE - RuvC domain
MDKKYSIGLAIGTNSVGWAVITDEYKVPSKKFKVLGNTDRHSIKKNLIGALLFDSGETAEATRLKRTARRRYTRRKNRICYLQEIFSNEMAKVDDSFFHRLEESFLVEEDKKHERHPIFGNIVDEVAYHEKYPTIYHLRKKLVDSTDKADLRLIYLALAHMIKFRGHFLIEGDLNPDNSDVDKLFIQLVQTYNQLFEENPINASGVDAKAILSARLSKSRRLENLIAQLPGEKKNGLFGNLIALSLGLTPNFKSNFDLAEDAKLQLSKDTYDDDLDNLLAQIGDQYADLFLAAKNLSDAILLSDILRVNTEITKAPLSASMIKRYDEHHQDLTLLKALVRQQLPEKYKEIFFDQSKNGYAGYIDGGASQEEFYKFIKPILEKMDGTEELLVKLNREDLLRKQRTFDNGSIPHQIHLGELHAILRRQEDFYPFLKDNREKIEKILTFRIPYYVGPLARGNSRFAWMTRKSEETITPWNFEEVVDKGASAQSFIERMTNFDKNLPNEKVLPKHSLLYEYFTVYNELTKVKYVTEGMRKPAFLSGEQKKAIVDLLFKTNRKVTVKQLKEDYFKKIECFDSVEISGVEDRFNASLGTYHDLLKIIKDKDFLDNEENEDILEDIVLTLTLFEDREMIEERLKTYAHLFDDKVMKQLKRRRYTGWGRLSRKLINGIRDKQSGKTILDFLKSDGFANRNFMQLIHDDSLTFKEDIQKAQVSGQGDSLHEHIANLAGSPAIKKGILQTVKVVDELVKVMGRHKPENIVIEMARENQTTQKGQKNSRERMKRIEEGIKELGSQILKEHPVENTQLQNEKLYLYYLQNGRDMYVDQELDINRLSDYDVDAIVPQSFLKDDSIDNKVLTRSDKNRGKSDNVPSEEVVKKMKNYWRQLLNAKLITQRKFDNLTKAERGGLSELDKAGFIKRQLVETRQITKHVAQILDSRMNTKYDENDKLIREVKVITLKSKLVSDFRKDFQFYKVREINNYHHAHDAYLNAVVGTALIKKYPKLESEFVYGDYKVYDVRKMIAKSEQEIGKATAKYFFYSNIMNFFKTEITLANGEIRKRPLIETNGETGEIVWDKGRDFATVRKVLSMPQVNIVKKTEVQTGGFSKESILPKRNSDKLIARKKDWDPKKYGGFDSPTVAYSVLVVAKVEKGKSKKLKSVKELLGITIMERSSFEKNPIDFLEAKGYKEVKKDLIIKLPKYSLFELENGRKRMLASAGELQKGNELALPSKYVNFLYLASHYEKLKGSPEDNEQKQLFVEQHKHYLDEIIEQISEFSKRVILADANLDKVLSAYNKHRDKPIREQAENIIHLFTLTNLGAPAAFKYFDTTIDRKRYTSTKEVLDATLIHQSITGLYETRIDLSQLGGD

SEQ ID NO: 204 - protein, 345 aa, Sulfolobus islandicus
  REGION 1..345: note = MISC_FEATURE - tr|F0NN87|F0NN87_SULIHCRISPR-associatedCasx protein OS =Sulfolobus islandicus (strain HVE10/4) GN = SiH_0402 PE=4; SV = 1);CasX polypeptide sequence
MEVPLYNIFGDNYIIQVATEAENSTIYNNKVEIDDEELRNVLNLAYKIAKNNEDAAAERRGKAKKKKGEEGETTTSNIILPLSGNDKNPWTETLKCYNFPTTVALSEVFKNFSQVKECEEVSAPSFVKPEFYEFGRSPGMVERTRRVKLEVEPHYLIIAAAGWVLTRLGKAKVSEGDYVGVNVFTPTRGILYSLIQNVNGIVPGIKPETAFGLWIARKVVSSVTNPNVSVVRIYTISDAVGQNPTTINGGFSIDLTKLLEKRYLLSERLEAIARNALSISSNMRERYIVLANYIYEYLTGSKRLEDLLYFANRDLIMNLNSDDGKVRDLKLISAYVNGELIRGEG

SEQ ID NO: 205 - protein, 345 aa, Sulfolobus islandicus
  REGION 1..345: note = MISC_FEATURE - tr|F0NH53|F0NH53_SULIR CRISPR associated protein, Casx OS =Sulfolobus islandicus (strain REY15A) GN=SiRe_0771 PE=4 SV=1);CasX polypeptide sequence
MEVPLYNIFGDNYIIQVATEAENSTIYNNKVEIDDEELRNVLNLAYKIAKNNEDAAAERRGKAKKKKGEEGETTTSNIILPLSGNDKNPWTETLKCYNFPTTVALSEVFKNFSQVKECEEVSAPSFVKPEFYKFGRSPGMVERTRRVKLEVEPHYLIMAAAGWVLTRLGKAKVSEGDYVGVNVFTPTRGILYSLIQNVNGIVPGIKPETAFGLWIARKVVSSVTNPNVSVVSIYTISDAVGQNPTTINGGFSIDLTKLLEKRDLLSERLEAIARNALSISSNMRERYIVLANYIYEYLTGSKRLEDLLYFANRDLIMNLNSDDGKVRDLKLISAYVNGELIRGEG

SEQ ID NO: 206 - protein, 987 aa, unidentified
  REGION 1..987: note = MISC_FEATURE - CasX polypeptide sequence
MEKRINKIRKKLSADNATKPVSRSGPMKTLLVRVMTDDLKKRLEKRRKKPEVMPQVISNNAANNLRMLLDDYTKMKEAILQVYWQEFKDDHVGLMCKFAQPASKKIDQNKLKPEMDEKGNLTTAGFACSQCGQPLFVYKLEQVSEKGKAYTNYFGRCNVAEHEKLILLAQLKPVKDSDEAVTYSLGKFGQRALDFYSIHVTKESTHPVKPLAQIAGNRYASGPVGKALSDACMGTIASFLSKYQDIIIEHQKVVKGNQKRLESLRELAGKENLEYPSVTLPPQPHTKEGVDFAYNEVIARVRMWVNLNLWQKLKLSRDDAKPLLRLKGFPSFPVVERRENEVDWWNTINEVKKLIDAKRDMGRVFWSGVTAEKRNTILEGYNYLPNENDHKKREGSLENPKKPAKRQFGDLLLYLEKKYAGDWGKVFDEAWERIDKKIAGLTSHIEREEARNAEDAQSKAVLTDWLRAKASFVLERLKEMDEKEFYACEIQLQKWYGDLRGNPFAVEAENRVVDISGFSIGSDGHSIQYRNLLAWKYLENGKREFYLLMNYGKKGRIRFTDGTDIKKSGKWQGLLYGGGKAKVIDLTFDPDDEQLIILPLAFGTRQGREFIWNDLLSLETGLIKLANGRVIEKTIYNKKIGRDEPALFVALTFERREVVDPSNIKPVNLIGVARGENIPAVIALTDPEGCPLPEFKDSSGGPTDILRIGEGYKEKQRAIQAAKEVEQRRAGGYSRKFASKSRNLADDMVRNSARDLFYHAVTHDAVLVFANLSRGFGRQGKRTFMTERQYTKMEDWLTAKLAYEGLTSKTYLSKTLAQYTSKTCSNCGFTITYADMDVMLVRLKKTSDGWATTLNNKELKAEYQITYYNRYKRQTVEKELSAELDRLSEESGNNDISKWTKGRRDEALFLLKKRFSHRPVQEQFVCLDCGHEVHAAEQAALNIARSWLFLNSNSTEFKSYKSGKQPFVGAWQAFYKRRLKEVWKPNA

SEQ ID NO: 207 - protein, 1210 aa, unidentified
  REGION 1..1210: note = MISC_FEATURE - APG80656.1 CRISPR-associated protein CasY [uncultured Parcubacteria group bacterium]; CasY polypeptide sequence
MSKRHPRISGVKGYRLHAQRLEYTGKSGAMRTIKYPLYSSPSGGRTVPREIVSAINDDYVGLYGLSNFDDLYNAEKRNEEKVYSVLDFWYDCVQYGAVFSYTAPGLLKNVAEVRGGSYELTKTLKGSHLYDELQIDKVIKFLNKKEISRANGSLDKLKKDIIDCFKAEYRERHKDQCNKLADDIKNAKKDAGASLGERQKKLFRDFFGISEQSENDKPSFTNPLNLTCCLLPFDTVNNNRNRGEVLFNKLKEYAQKLDKNEGSLEMWEYIGIGNSGTAFSNFLGEGFLGRLRENKITELKKAMMDITDAWRGQEQEEELEKRLRILAALTIKLREPKFDNHWGGYRSDINGKLSSWLQNYINQTVKIKEDLKGHKKDLKKAKEMINRFGESDTKEEAVVSSLLESIEKIVPDDSADDEKPDIPAIAIYRRFLSDGRLTLNRFVQREDVQEALIKERLEAEKKKKPKKRKKKSDAEDEKETIDFKELFPHLAKPLKLVPNFYGDSKRELYKKYKNAAIYTDALWKAVEKIYKSAFSSSLKNSFFDTDFDKDFFIKRLQKIFSVYRRFNTDKWKPIVKNSFAPYCDIVSLAENEVLYKPKQSRSRKSAAIDKNRVRLPSTENIAKAGIALARELSVAGFDWKDLLKKEEHEEYIDLIELHKTALALLLAVTETQLDISALDFVENGTVKDFMKTRDGNLVLEGRFLEMFSQSIVFSELRGLAGLMSRKEFITRSAIQTMNGKQAELLYIPHEFQSAKITTPKEMSRAFLDLAPAEFATSLEPESLSEKSLLKLKQMRYYPHYFGYELTRTGQGIDGGVAENALRLEKSPVKKREIKCKQYKTLGRGQNKIVLYVRSSYYQTQFLEWFLHRPKNVQTDVAVSGSFLIDEKKVKTRWNYDALTVALEPVSGSERVFVSQPFTIFPEKSAEEEGQRYLGIDIGEYGIAYTALEITGDSAKILDQNFISDPQLKTLREEVKGLKLDQRRGTFAMPSTKIARIRESLVHSLRNRIHHLALKHKAKIVYELEVSRFEEGKQKIKKVYATLKKADVYSEIDADKNLQTTVWGKLAVASEISASYTSQFCGACKKLWRAEMQVDETITTQELIGTVRVIKGGTLIDAIKDFMRPPIFDENDTPFPKYRDFCDKHHISKKMRGNSCLFICPFCRANADADIQASQTIALLRYVKEEKKVEDYFERFRKLKNIKVLGQMKKI

SEQ ID NO: 208 - protein, 1082 aa, Neisseria meningitidis
  REGION 1..1082: note = MISC_FEATURE - NCBI Reference: WP_002235162.1; type II CRISPR RNA-guided endonuclease Cas9; Nme1Cas9 polypeptide sequence
MAAFKPNPINYILGLDIGIASVGWAMVEIDEDENPICLIDLGVRVFERAEVPKTGDSLAMARRLARSVRRLTRRRAHRLLRARRLLKREGVLQAADFDENGLIKSLPNTPWQLRAAALDRKLTPLEWSAVLLHLIKHRGYLSQRKNEGETADKELGALLKGVADNAHALQTGDFRTPAELALNKFEKESGHIRNQRGDYSHTFSRKDLQAELILLFEKQKEFGNPHVSGGLKEGIETLLMTQRPALSGDAVQKMLGHCTFEPAEPKAAKNTYTAERFIWLTKLNNLRILEQGSERPLTDTERATLMDEPYRKSKLTYAQARKLLGLEDTAFFKGLRYGKDNAEASTLMEMKAYHAISRALEKEGLKDKKSPLNLSPELQDEIGTAFSLFKTDEDITGRLKDRIQPEILEALLKHISFDKFVQISLKALRRIVPLMEQGKRYDEACAEIYGDHYGKKNTEEKIYLPPIPADEIRNPVVLRALSQARKVINGVVRRYGSPARIHIETAREVGKSFKDRKEIEKRQEENRKDREKAAAKFREYFPNFVGEPKSKDILKLRLYEQQHGKCLYSGKEINLGRLNEKGYVEIDHALPFSRTWDDSFNNKVLVLGSENQNKGNQTPYEYFNGKDNSREWQEFKARVETSRFPRSKKQRILLQKFDEDGFKERNLNDTRYVNRFLCQFVADRMRLTGKGKKRVFASNGQITNLLRGFWGLRKVRAENDRHHALDAVVVACSTVAMQQKITRFVRYKEMNAFDGKTIDKETGEVLHQKTHFPQPWEFFAQEVMIRVFGKPDGKPEFEEADTPEKLRTLLAEKLSSRPEAVHEYVTPLFVSRAPNRKMSGQGHMETVKSAKRLDEGVSVLRVPLTQLKLKDLEKMVNREREPKLYEALKARLEAHKDDPAKAFAEPFYKYDKAGNRTQQVKAVRVEQVQKTGVWVRNHNGIADNATMVRVDVFEKGDKYYLVPIYSWQVAKGILPDRAVVQGKDEEDWQLIDDSFNFKFSLHPNDLVEVITKKARMFGYFASCHRGTGNINIRIHDLDHKIGKNGILEGIGVKTALSFQKYQIDELGKEIRPCRLKKRPPVR

SEQ ID NO: 209 - protein, 1082 aa, Neisseria meningitidis
  REGION 1..1082: note = MISC_FEATURE - NCBI Reference: WP_002230835; type II CRISPR RNA-guided endonuclease Cas9; Nme2Cas9 polypeptide sequence
MAAFKPNPINYILGLDIGIASVGWAMVEIDEEENPIRLIDLGVRVFERAEVPKTGDSLAMARRLARSVRRLTRRRAHRLLRARRLLKREGVLQAADFDENGLIKSLPNTPWQLRAAALDRKLTPLEWSAVLLHLIKHRGYLSQRKNEGETADKELGALLKGVANNAHALQTGDFRTPAELALNKFEKESGHIRNQRGDYSHTFSRKDLQAELILLFEKQKEFGNPHVSGGLKEGIETLLMTQRPALSGDAVQKMLGHCTFEPAEPKAAKNTYTAERFIWLTKLNNLRILEQGSERPLTDTERATLMDEPYRKSKLTYAQARKLLGLEDTAFFKGLRYGKDNAEASTLMEMKAYHAISRALEKEGLKDKKSPLNLSSELQDEIGTAFSLFKTDEDITGRLKDRVQPEILEALLKHISFDKFVQISLKALRRIVPLMEQGKRYDEACAEIYGDHYGKKNTEEKIYLPPIPADEIRNPVVLRALSQARKVINGVVRRYGSPARIHIETAREVGKSFKDRKEIEKRQEENRKDREKAAAKFREYFPNFVGEPKSKDILKLRLYEQQHGKCLYSGKEINLVRLNEKGYVEIDHALPFSRTWDDSFNNKVLVLGSENQNKGNQTPYEYFNGKDNSREWQEFKARVETSRFPRSKKQRILLQKFDEDGFKECNLNDTRYVNRFLCQFVADHILLTGKGKRRVFASNGQITNLLRGFWGLRKVRAENDRHHALDAVVVACSTVAMQQKITRFVRYKEMNAFDGKTIDKETGKVLHQKTHFPQPWEFFAQEVMIRVFGKPDGKPEFEEADTPEKLRTLLAEKLSSRPEAVHEYVTPLFVSRAPNRKMSGAHKDTLRSAKRFVKHNEKISVKRVWLTEIKLADLENMVNYKNGREIELYEALKARLEAYGGNAKQAFDPKDNPFYKKGGQLVKAVRVEKTQESGVLLNKKNAYTIADNGDMVRVDVFCKVDKKGKNQYFIVPIYAWQVAENILPDIDCKGYRIDDSYTFCFSLHKYDLIAFQKDEKSKVEFAYYINCDSSNGRFYLAWHDKGSKEQQFRISTQNLVLIQKYQVNELGKEIRPCRLKKRPPVR

SEQ ID NO: 210 - protein, 1300 aa, Francisella tularensis
  REGION 1..1300: note = MISC_FEATURE - wild type Cpf1 polypeptide sequence
  source 1..1300: note = subspecies novicida
MSIYQEFVNKYSLSKTLRFELIPQGKTLENIKARGLILDDEKRAKDYKKAKQIIDKYHQFFIEEILSSVCISEDLLQNYSDVYFKLKKSDDDNLQKDFKSAKDTIKKQISEYIKDSEKFKNLFNQNLIDAKKGQESDLILWLKQSKDNGIELFKANSDITDIDEALEIIKSFKGWTTYFKGFHENRKNVYSSNDIPTSIIYRIVDDNLPKFLENKAKYESLKDKAPEAINYEQIKKDLAEELTFDIDYKTSEVNQRVFSLDEVFEIANFNNYLNQSGITKFNTIIGGKFVNGENTKRKGINEYINLYSQQINDKTLKKYKMSVLFKQILSDTESKSFVIDKLEDDSDVVTTMQSFYEQIAAFKTVEEKSIKETLSLLFDDLKAQKLDLSKIYFKNDKSLTDLSQQVFDDYSVIGTAVLEYITQQIAPKNLDNPSKKEQELIAKKTEKAKYLSLETIKLALEEFNKHRDIDKQCRFEEILANFAAIPMIFDEIAQNKDNLAQISIKYQNQGKKDLLQASAEDDVKAIKDLLDQTNNLLHKLKIFHISQSEDKANILDKDEHFYLVFEECYFELANIVPLYNKIRNYITQKPYSDEKFKLNFENSTLANGWDKNKEPDNTAILFIKDDKYYLGVMNKKNNKIFDDKAIKENKGEGYKKIVYKLLPGANKMLPKVFFSAKSIKFYNPSEDILRIRNHSTHTKNGSPQKGYEKFEFNIEDCRKFIDFYKQSISKHPEWKDFGFRFSDTQRYNSIDEFYREVENQGYKLTFENISESYIDSVVNQGKLYLFQIYNKDFSAYSKGRPNLHTLYWKALFDERNLQDVVYKLNGEAELFYRKQSIPKKITHPAKEAIANKNKDNPKKESVFEYDLIKDKRFTEDKFFFHCPITINFKSSGANKFNDEINLLLKEKANDVHILSIDRGERHLAYYTLVDGKGNIIKQDTFNIIGNDRMKTNYHDKLAAIEKDRDSARKDWKKINNIKEMKEGYLSQVVHEIAKLVIEYNAIVVFEDLNFGFKRGRFKVEKQVYQKLEKMLIEKLNYLVFKDNEFDKTGGVLRAYQLTAPFETFKKMGKQTGIIYYVPAGFTSKICPVTGFVNQLYPKYESVSKSQEFFSKFDKICYNLDKGYFEFSFDYKNFGDKAAKGKWTIASFGSRLINFRNSDKNHNWDTREVYPTKELEKLLKDYSIEYGHGECIKAAICGESDKKFFAKLTSVLNTILQMRNSKTGTELDYLISPVADVNGNFFDSRQAPKNMPQDADANGAYHIGLKGLMLLGRIKNNQEGKKLNLVIKNEEYFEFVQNRNN

SEQ ID NO: 211 - protein, 1300 aa, Francisella tularensis
  REGION 1..1300: note = MISC_FEATURE - Cpf1 D917A polypeptide sequence
  source 1..1300: note = subspecies novicida
MSIYQEFVNKYSLSKTLRFELIPQGKTLENIKARGLILDDEKRAKDYKKAKQIIDKYHQFFIEEILSSVCISEDLLQNYSDVYFKLKKSDDDNLQKDFKSAKDTIKKQISEYIKDSEKFKNLFNQNLIDAKKGQESDLILWLKQSKDNGIELFKANSDITDIDEALEIIKSFKGWTTYFKGFHENRKNVYSSNDIPTSIIYRIVDDNLPKFLENKAKYESLKDKAPEAINYEQIKKDLAEELTFDIDYKTSEVNQRVFSLDEVFEIANFNNYLNQSGITKFNTIIGGKFVNGENTKRKGINEYINLYSQQINDKTLKKYKMSVLFKQILSDTESKSFVIDKLEDDSDVVTTMQSFYEQIAAFKTVEEKSIKETLSLLFDDLKAQKLDLSKIYFKNDKSLTDLSQQVFDDYSVIGTAVLEYITQQIAPKNLDNPSKKEQELIAKKTEKAKYLSLETIKLALEEFNKHRDIDKQCRFEEILANFAAIPMIFDEIAQNKDNLAQISIKYQNQGKKDLLQASAEDDVKAIKDLLDQTNNLLHKLKIFHISQSEDKANILDKDEHFYLVFEECYFELANIVPLYNKIRNYITQKPYSDEKFKLNFENSTLANGWDKNKEPDNTAILFIKDDKYYLGVMNKKNNKIFDDKAIKENKGEGYKKIVYKLLPGANKMLPKVFFSAKSIKFYNPSEDILRIRNHSTHTKNGSPQKGYEKFEFNIEDCRKFIDFYKQSISKHPEWKDFGFRFSDTQRYNSIDEFYREVENQGYKLTFENISESYIDSVVNQGKLYLFQIYNKDFSAYSKGRPNLHTLYWKALFDERNLQDVVYKLNGEAELFYRKQSIPKKITHPAKEAIANKNKDNPKKESVFEYDLIKDKRFTEDKFFFHCPITINFKSSGANKFNDEINLLLKEKANDVHILSIARGERHLAYYTLVDGKGNIIKQDTFNIIGNDRMKTNYHDKLAAIEKDRDSARKDWKKINNIKEMKEGYLSQVVHEIAKLVIEYNAIVVFEDLNFGFKRGRFKVEKQVYQKLEKMLIEKLNYLVFKDNEFDKTGGVLRAYQLTAPFETFKKMGKQTGIIYYVPAGFTSKICPVTGFVNQLYPKYESVSKSQEFFSKFDKICYNLDKGYFEFSFDYKNFGDKAAKGKWTIASFGSRLINFRNSDKNHNWDTREVYPTKELEKLLKDYSIEYGHGECIKAAICGESDKKFFAKLTSVLNTILQMRNSKTGTELDYLISPVADVNGNFFDSRQAPKNMPQDADANGAYHIGLKGLMLLGRIKNNQEGKKLNLVIKNEEYFEFVQNRNN

SEQ ID NO: 212 - protein, 1300 aa, Francisella tularensis
  REGION 1..1300: note = MISC_FEATURE - Cpf1 E1006A polypeptide sequence
  source 1..1300: note = subspecies novicida
MSIYQEFVNKYSLSKTLRFELIPQGKTLENIKARGLILDDEKRAKDYKKAKQIIDKYHQFFIEEILSSVCISEDLLQNYSDVYFKLKKSDDDNLQKDFKSAKDTIKKQISEYIKDSEKFKNLFNQNLIDAKKGQESDLILWLKQSKDNGIELFKANSDITDIDEALEIIKSFKGWTTYFKGFHENRKNVYSSNDIPTSIIYRIVDDNLPKFLENKAKYESLKDKAPEAINYEQIKKDLAEELTFDIDYKTSEVNQRVFSLDEVFEIANFNNYLNQSGITKFNTIIGGKFVNGENTKRKGINEYINLYSQQINDKTLKKYKMSVLFKQILSDTESKSFVIDKLEDDSDVVTTMQSFYEQIAAFKTVEEKSIKETLSLLFDDLKAQKLDLSKIYFKNDKSLTDLSQQVFDDYSVIGTAVLEYITQQIAPKNLDNPSKKEQELIAKKTEKAKYLSLETIKLALEEFNKHRDIDKQCRFEEILANFAAIPMIFDEIAQNKDNLAQISIKYQNQGKKDLLQASAEDDVKAIKDLLDQTNNLLHKLKIFHISQSEDKANILDKDEHFYLVFEECYFELANIVPLYNKIRNYITQKPYSDEKFKLNFENSTLANGWDKNKEPDNTAILFIKDDKYYLGVMNKKNNKIFDDKAIKENKGEGYKKIVYKLLPGANKMLPKVFFSAKSIKFYNPSEDILRIRNHSTHTKNGSPQKGYEKFEFNIEDCRKFIDFYKQSISKHPEWKDFGFRFSDTQRYNSIDEFYREVENQGYKLTFENISESYIDSVVNQGKLYLFQIYNKDFSAYSKGRPNLHTLYWKALFDERNLQDVVYKLNGEAELFYRKQSIPKKITHPAKEAIANKNKDNPKKESVFEYDLIKDKRFTEDKFFFHCPITINFKSSGANKFNDEINLLLKEKANDVHILSIDRGERHLAYYTLVDGKGNIIKQDTFNIIGNDRMKTNYHDKLAAIEKDRDSARKDWKKINNIKEMKEGYLSQVVHEIAKLVIEYNAIVVFADLNFGFKRGRFKVEKQVYQKLEKMLIEKLNYLVFKDNEFDKTGGVLRAYQLTAPFETFKKMGKQTGIIYYVPAGFTSKICPVTGFVNQLYPKYESVSKSQEFFSKFDKICYNLDKGYFEFSFDYKNFGDKAAKGKWTIASFGSRLINFRNSDKNHNWDTREVYPTKELEKLLKDYSIEYGHGECIKAAICGESDKKFFAKLTSVLNTILQMRNSKTGTELDYLISPVADVNGNFFDSRQAPKNMPQDADANGAYHIGLKGLMLLGRIKNNQEGKKLNLVIKNEEYFEFVQNRNN

SEQ ID NO: 213 - protein, 1300 aa, Francisella tularensis
  REGION 1..1300: note = MISC_FEATURE - Cpf1 D1255A polypeptide sequence
  source 1..1300: note = subspecies novicida
MSIYQEFVNKYSLSKTLRFELIPQGKTLENIKARGLILDDEKRAKDYKKAKQIIDKYHQFFIEEILSSVCISEDLLQNYSDVYFKLKKSDDDNLQKDFKSAKDTIKKQISEYIKDSEKFKNLFNQNLIDAKKGQESDLILWLKQSKDNGIELFKANSDITDIDEALEIIKSFKGWTTYFKGFHENRKNVYSSNDIPTSIIYRIVDDNLPKFLENKAKYESLKDKAPEAINYEQIKKDLAEELTFDIDYKTSEVNQRVFSLDEVFEIANFNNYLNQSGITKFNTIIGGKFVNGENTKRKGINEYINLYSQQINDKTLKKYKMSVLFKQILSDTESKSFVIDKLEDDSDVVTTMQSFYEQIAAFKTVEEKSIKETLSLLFDDLKAQKLDLSKIYFKNDKSLTDLSQQVFDDYSVIGTAVLEYITQQIAPKNLDNPSKKEQELIAKKTEKAKYLSLETIKLALEEFNKHRDIDKQCRFEEILANFAAIPMIFDEIAQNKDNLAQISIKYQNQGKKDLLQASAEDDVKAIKDLLDQTNNLLHKLKIFHISQSEDKANILDKDEHFYLVFEECYFELANIVPLYNKIRNYITQKPYSDEKFKLNFENSTLANGWDKNKEPDNTAILFIKDDKYYLGVMNKKNNKIFDDKAIKENKGEGYKKIVYKLLPGANKMLPKVFFSAKSIKFYNPSEDILRIRNHSTHTKNGSPQKGYEKFEFNIEDCRKFIDFYKQSISKHPEWKDFGFRFSDTQRYNSIDEFYREVENQGYKLTFENISESYIDSVVNQGKLYLFQIYNKDFSAYSKGRPNLHTLYWKALFDERNLQDVVYKLNGEAELFYRKQSIPKKITHPAKEAIANKNKDNPKKESVFEYDLIKDKRFTEDKFFFHCPITINFKSSGANKFNDEINLLLKEKANDVHILSIDRGERHLAYYTLVDGKGNIIKQDTFNIIGNDRMKTNYHDKLAAIEKDRDSARKDWKKINNIKEMKEGYLSQVVHEIAKLVIEYNAIVVFEDLNFGFKRGRFKVEKQVYQKLEKMLIEKLNYLVFKDNEFDKTGGVLRAYQLTAPFETFKKMGKQTGIIYYVPAGFTSKICPVTGFVNQLYPKYESVSKSQEFFSKFDKICYNLDKGYFEFSFDYKNFGDKAAKGKWTIASFGSRLINFRNSDKNHNWDTREVYPTKELEKLLKDYSIEYGHGECIKAAICGESDKKFFAKLTSVLNTILQMRNSKTGTELDYLISPVADVNGNFFDSRQAPKNMPQDAAANGAYHIGLKGLMLLGRIKNNQEGKKLNLVIKNEEYFEFVQNRNN

SEQ ID NO: 214 - protein, 1300 aa, Francisella tularensis
  REGION 1..1300: note = MISC_FEATURE - Cpf1 D917A/E1006A polypeptide sequence
  source 1..1300: note = subspecies novicida
MSIYQEFVNKYSLSKTLRFELIPQGKTLENIKARGLILDDEKRAKDYKKAKQIIDKYHQFFIEEILSSVCISEDLLQNYSDVYFKLKKSDDDNLQKDFKSAKDTIKKQISEYIKDSEKFKNLFNQNLIDAKKGQESDLILWLKQSKDNGIELFKANSDITDIDEALEIIKSFKGWTTYFKGFHENRKNVYSSNDIPTSIIYRIVDDNLPKFLENKAKYESLKDKAPEAINYEQIKKDLAEELTFDIDYKTSEVNQRVFSLDEVFEIANFNNYLNQSGITKFNTIIGGKFVNGENTKRKGINEYINLYSQQINDKTLKKYKMSVLFKQILSDTESKSFVIDKLEDDSDVVTTMQSFYEQIAAFKTVEEKSIKETLSLLFDDLKAQKLDLSKIYFKNDKSLTDLSQQVFDDYSVIGTAVLEYITQQIAPKNLDNPSKKEQELIAKKTEKAKYLSLETIKLALEEFNKHRDIDKQCRFEEILANFAAIPMIFDEIAQNKDNLAQISIKYQNQGKKDLLQASAEDDVKAIKDLLDQTNNLLHKLKIFHISQSEDKANILDKDEHFYLVFEECYFELANIVPLYNKIRNYITQKPYSDEKFKLNFENSTLANGWDKNKEPDNTAILFIKDDKYYLGVMNKKNNKIFDDKAIKENKGEGYKKIVYKLLPGANKMLPKVFFSAKSIKFYNPSEDILRIRNHSTHTKNGSPQKGYEKFEFNIEDCRKFIDFYKQSISKHPEWKDFGFRFSDTQRYNSIDEFYREVENQGYKLTFENISESYIDSVVNQGKLYLFQIYNKDFSAYSKGRPNLHTLYWKALFDERNLQDVVYKLNGEAELFYRKQSIPKKITHPAKEAIANKNKDNPKKESVFEYDLIKDKRFTEDKFFFHCPITINFKSSGANKFNDEINLLLKEKANDVHILSIARGERHLAYYTLVDGKGNIIKQDTFNIIGNDRMKTNYHDKLAAIEKDRDSARKDWKKINNIKEMKEGYLSQVVHEIAKLVIEYNAIVVFADLNFGFKRGRFKVEKQVYQKLEKMLIEKLNYLVFKDNEFDKTGGVLRAYQLTAPFETFKKMGKQTGIIYYVPAGFTSKICPVTGFVNQLYPKYESVSKSQEFFSKFDKICYNLDKGYFEFSFDYKNFGDKAAKGKWTIASFGSRLINFRNSDKNHNWDTREVYPTKELEKLLKDYSIEYGHGECIKAAICGESDKKFFAKLTSVLNTILQMRNSKTGTELDYLISPVADVNGNFFDSRQAPKNMPQDADANGAYHIGLKGLMLLGRIKNNQEGKKLNLVIKNEEYFEFVQNRNN

SEQ ID NO: 215 - protein, 1300 aa, Francisella tularensis
  REGION 1..1300: note = MISC_FEATURE - Cpf1 D917A/D1255A polypeptide sequence
  source 1..1300: note = subspecies novicida
MSIYQEFVNKYSLSKTLRFELIPQGKTLENIKARGLILDDEKRAKDYKKAKQIIDKYHQFFIEEILSSVCISEDLLQNYSDVYFKLKKSDDDNLQKDFKSAKDTIKKQISEYIKDSEKFKNLFNQNLIDAKKGQESDLILWLKQSKDNGIELFKANSDITDIDEALEIIKSFKGWTTYFKGFHENRKNVYSSNDIPTSIIYRIVDDNLPKFLENKAKYESLKDKAPEAINYEQIKKDLAEELTFDIDYKTSEVNQRVFSLDEVFEIANFNNYLNQSGITKFNTIIGGKFVNGENTKRKGINEYINLYSQQINDKTLKKYKMSVLFKQILSDTESKSFVIDKLEDDSDVVTTMQSFYEQIAAFKTVEEKSIKETLSLLFDDLKAQKLDLSKIYFKNDKSLTDLSQQVFDDYSVIGTAVLEYITQQIAPKNLDNPSKKEQELIAKKTEKAKYLSLETIKLALEEFNKHRDIDKQCRFEEILANFAAIPMIFDEIAQNKDNLAQISIKYQNQGKKDLLQASAEDDVKAIKDLLDQTNNLLHKLKIFHISQSEDKANILDKDEHFYLVFEECYFELANIVPLYNKIRNYITQKPYSDEKFKLNFENSTLANGWDKNKEPDNTAILFIKDDKYYLGVMNKKNNKIFDDKAIKENKGEGYKKIVYKLLPGANKMLPKVFFSAKSIKFYNPSEDILRIRNHSTHTKNGSPQKGYEKFEFNIEDCRKFIDFYKQSISKHPEWKDFGFRFSDTQRYNSIDEFYREVENQGYKLTFENISESYIDSVVNQGKLYLFQIYNKDFSAYSKGRPNLHTLYWKALFDERNLQDVVYKLNGEAELFYRKQSIPKKITHPAKEAIANKNKDNPKKESVFEYDLIKDKRFTEDKFFFHCPITINFKSSGANKFNDEINLLLKEKANDVHILSIARGERHLAYYTLVDGKGNIIKQDTFNIIGNDRMKTNYHDKLAAIEKDRDSARKDWKKINNIKEMKEGYLSQVVHEIAKLVIEYNAIVVFEDLNFGFKRGRFKVEKQVYQKLEKMLIEKLNYLVFKDNEFDKTGGVLRAYQLTAPFETFKKMGKQTGIIYYVPAGFTSKICPVTGFVNQLYPKYESVSKSQEFFSKFDKICYNLDKGYFEFSFDYKNFGDKAAKGKWTIASFGSRLINFRNSDKNHNWDTREVYPTKELEKLLKDYSIEYGHGECIKAAICGESDKKFFAKLTSVLNTILQMRNSKTGTELDYLISPVADVNGNFFDSRQAPKNMPQDAAANGAYHIGLKGLMLLGRIKNNQEGKKLNLVIKNEEYFEFVQNRNN

SEQ ID NO: 216 - protein, 1300 aa, Francisella tularensis
  REGION 1..1300: note = MISC_FEATURE - Cpf1 E1006A/D1255A polypeptide sequence
  source 1..1300: note = subspecies novicida
MSIYQEFVNKYSLSKTLRFELIPQGKTLENIKARGLILDDEKRAKDYKKAKQIIDKYHQFFIEEILSSVCISEDLLQNYSDVYFKLKKSDDDNLQKDFKSAKDTIKKQISEYIKDSEKFKNLFNQNLIDAKKGQESDLILWLKQSKDNGIELFKANSDITDIDEALEIIKSFKGWTTYFKGFHENRKNVYSSNDIPTSIIYRIVDDNLPKFLENKAKYESLKDKAPEAINYEQIKKDLAEELTFDIDYKTSEVNQRVFSLDEVFEIANFNNYLNQSGITKFNTIIGGKFVNGENTKRKGINEYINLYSQQINDKTLKKYKMSVLFKQILSDTESKSFVIDKLEDDSDVVTTMQSFYEQIAAFKTVEEKSIKETLSLLFDDLKAQKLDLSKIYFKNDKSLTDLSQQVFDDYSVIGTAVLEYITQQIAPKNLDNPSKKEQELIAKKTEKAKYLSLETIKLALEEFNKHRDIDKQCRFEEILANFAAIPMIFDEIAQNKDNLAQISIKYQNQGKKDLLQASAEDDVKAIKDLLDQTNNLLHKLKIFHISQSEDKANILDKDEHFYLVFEECYFELANIVPLYNKIRNYITQKPYSDEKFKLNFENSTLANGWDKNKEPDNTAILFIKDDKYYLGVMNKKNNKIFDDKAIKENKGEGYKKIVYKLLPGANKMLPKVFFSAKSIKFYNPSEDILRIRNHSTHTKNGSPQKGYEKFEFNIEDCRKFIDFYKQSISKHPEWKDFGFRFSDTQRYNSIDEFYREVENQGYKLTFENISESYIDSVVNQGKLYLFQIYNKDFSAYSKGRPNLHTLYWKALFDERNLQDVVYKLNGEAELFYRKQSIPKKITHPAKEAIANKNKDNPKKESVFEYDLIKDKRFTEDKFFFHCPITINFKSSGANKFNDEINLLLKEKANDVHILSIDRGERHLAYYTLVDGKGNIIKQDTFNIIGNDRMKTNYHDKLAAIEKDRDSARKDWKKINNIKEMKEGYLSQVVHEIAKLVIEYNAIVVFADLNFGFKRGRFKVEKQVYQKLEKMLIEKLNYLVFKDNEFDKTGGVLRAYQLTAPFETFKKMGKQTGIIYYVPAGFTSKICPVTGFVNQLYPKYESVSKSQEFFSKFDKICYNLDKGYFEFSFDYKNFGDKAAKGKWTIASFGSRLINFRNSDKNHNWDTREVYPTKELEKLLKDYSIEYGHGECIKAAICGESDKKFFAKLTSVLNTILQMRNSKTGTELDYLISPVADVNGNFFDSRQAPKNMPQDAAANGAYHIGLKGLMLLGRIKNNQEGKKLNLVIKNEEYFEFVQNRNN

SEQ ID NO: 217 - protein, 1300 aa, Francisella tularensis
  REGION 1..1300: note = MISC_FEATURE - Cpf1 D917A/E1006A/D1255A polypeptide sequence
  source 1..1300: note = subspecies novicida
MSIYQEFVNKYSLSKTLRFELIPQGKTLENIKARGLILDDEKRAKDYKKAKQIIDKYHQFFIEEILSSVCISEDLLQNYSDVYFKLKKSDDDNLQKDFKSAKDTIKKQISEYIKDSEKFKNLFNQNLIDAKKGQESDLILWLKQSKDNGIELFKANSDITDIDEALEIIKSFKGWTTYFKGFHENRKNVYSSNDIPTSIIYRIVDDNLPKFLENKAKYESLKDKAPEAINYEQIKKDLAEELTFDIDYKTSEVNQRVFSLDEVFEIANFNNYLNQSGITKFNTIIGGKFVNGENTKRKGINEYINLYSQQINDKTLKKYKMSVLFKQILSDTESKSFVIDKLEDDSDVVTTMQSFYEQIAAFKTVEEKSIKETLSLLFDDLKAQKLDLSKIYFKNDKSLTDLSQQVFDDYSVIGTAVLEYITQQIAPKNLDNPSKKEQELIAKKTEKAKYLSLETIKLALEEFNKHRDIDKQCRFEEILANFAAIPMIFDEIAQNKDNLAQISIKYQNQGKKDLLQASAEDDVKAIKDLLDQTNNLLHKLKIFHISQSEDKANILDKDEHFYLVFEECYFELANIVPLYNKIRNYITQKPYSDEKFKLNFENSTLANGWDKNKEPDNTAILFIKDDKYYLGVMNKKNNKIFDDKAIKENKGEGYKKIVYKLLPGANKMLPKVFFSAKSIKFYNPSEDILRIRNHSTHTKNGSPQKGYEKFEFNIEDCRKFIDFYKQSISKHPEWKDFGFRFSDTQRYNSIDEFYREVENQGYKLTFENISESYIDSVVNQGKLYLFQIYNKDFSAYSKGRPNLHTLYWKALFDERNLQDVVYKLNGEAELFYRKQSIPKKITHPAKEAIANKNKDNPKKESVFEYDLIKDKRFTEDKFFFHCPITINFKSSGANKFNDEINLLLKEKANDVHILSIARGERHLAYYTLVDGKGNIIKQDTFNIIGNDRMKTNYHDKLAAIEKDRDSARKDWKKINNIKEMKEGYLSQVVHEIAKLVIEYNAIVVFADLNFGFKRGRFKVEKQVYQKLEKMLIEKLNYLVFKDNEFDKTGGVLRAYQLTAPFETFKKMGKQTGIIYYVPAGFTSKICPVTGFVNQLYPKYESVSKSQEFFSKFDKICYNLDKGYFEFSFDYKNFGDKAAKGKWTIASFGSRLINFRNSDKNHNWDTREVYPTKELEKLLKDYSIEYGHGECIKAAICGESDKKFFAKLTSVLNTILQMRNSKTGTELDYLISPVADVNGNFFDSRQAPKNMPQDAAANGAYHIGLKGLMLLGRIKNNQEGKKLNLVIKNEEYFEFVQNRNN

SEQ ID NO: 218 - protein, 1052 aa, Staphylococcus aureus
  REGION 1..1052: note = MISC_FEATURE - Exemplary SaCas9 polypeptide sequence
KRNYILGLDIGITSVGYGIIDYETRDVIDAGVRLFKEANVENNEGRRSKRGARRLKRRRRHRIQRVKKLLFDYNLLTDHSELSGINPYEARVKGLSQKLSEEEFSAALLHLAKRRGVHNVNEVEEDTGNELSTKEQISRNSKALEEKYVAELQLERLKKDGEVRGSINRFKTSDYVKEAKQLLKVQKAYHQLDQSFIDTYIDLLETRRTYYEGPGEGSPFGWKDIKEWYEMLMGHCTYFPEELRSVKYAYNADLYNALNDLNNLVITRDENEKLEYYEKFQIIENVFKQKKKPTLKQIAKEILVNEEDIKGYRVTSTGKPEFTNLKVYHDIKDITARKEIIENAELLDQIAKILTIYQSSEDIQEELTNLNSELTQEEIEQISNLKGYTGTHNLSLKAINLILDELWHTNDNQIAIFNRLKLVPKKVDLSQQKEIPTTLVDDFILSPVVKRSFIQSIKVINAIIKKYGLPNDIIIELAREKNSKDAQKMINEMQKRNRQTNERIEEIIRTTGKENAKYLIEKIKLHDMQEGKCLYSLEAIPLEDLLNNPFNYEVDHIIPRSVSFDNSFNNKVLVKQEENSKKGNRTPFQYLSSSDSKISYETFKKHILNLAKGKGRISKTKKEYLLEERDINRFSVQKDFINRNLVDTRYATRGLMNLLRSYFRVNNLDVKVKSINGGFTSFLRRKWKFKKERNKGYKHHAEDALIIANADFIFKEWKKLDKAKKVMENQMFEEKQAESMPEIETEQEYKEIFITPHQIKHIKDFKDYKYSHRVDKKPNRELINDTLYSTRKDDKGNTLIVNNLNGLYDKDNDKLKKLINKSPEKLLMYHHDPQTYQKLKLIMEQYGDEKNPLYKYYEETGNYLTKYSKKDNGPVIKKIKYYGNKLNAHLDITDDYPNSRNKVVKLSLKPYRFDVYLDNGVYKFVTVKNLDVIKKENYYEVNSKCYEEAKKLKKISNQAEFIASFYNNDLIKINGELYRVIGVNNDLLNRIEVNMIDITYREYLENMNDKRPPRIIKTIASKTQSIKKYSTDILGNLYEVKSKKHPQIIKKG

SEQ ID NO: 219 - protein, 1052 aa, Staphylococcus aureus
  REGION 1..1052: note = MISC_FEATURE - SaCas9n polypeptide sequence
KRNYILGLDIGITSVGYGIIDYETRDVIDAGVRLFKEANVENNEGRRSKRGARRLKRRRRHRIQRVKKLLFDYNLLTDHSELSGINPYEARVKGLSQKLSEEEFSAALLHLAKRRGVHNVNEVEEDTGNELSTKEQISRNSKALEEKYVAELQLERLKKDGEVRGSINRFKTSDYVKEAKQLLKVQKAYHQLDQSFIDTYIDLLETRRTYYEGPGEGSPFGWKDIKEWYEMLMGHCTYFPEELRSVKYAYNADLYNALNDLNNLVITRDENEKLEYYEKFQIIENVFKQKKKPTLKQIAKEILVNEEDIKGYRVTSTGKPEFTNLKVYHDIKDITARKEIIENAELLDQIAKILTIYQSSEDIQEELTNLNSELTQEEIEQISNLKGYTGTHNLSLKAINLILDELWHTNDNQIAIFNRLKLVPKKVDLSQQKEIPTTLVDDFILSPVVKRSFIQSIKVINAIIKKYGLPNDIIIELAREKNSKDAQKMINEMQKRNRQTNERIEEIIRTTGKENAKYLIEKIKLHDMQEGKCLYSLEAIPLEDLLNNPFNYEVDHIIPRSVSFDNSFNNKVLVKQEEASKKGNRTPFQYLSSSDSKISYETFKKHILNLAKGKGRISKTKKEYLLEERDINRFSVQKDFINRNLVDTRYATRGLMNLLRSYFRVNNLDVKVKSINGGFTSFLRRKWKFKKERNKGYKHHAEDALIIANADFIFKEWKKLDKAKKVMENQMFEEKQAESMPEIETEQEYKEIFITPHQIKHIKDFKDYKYSHRVDKKPNRELINDTLYSTRKDDKGNTLIVNNLNGLYDKDNDKLKKLINKSPEKLLMYHHDPQTYQKLKLIMEQYGDEKNPLYKYYEETGNYLTKYSKKDNGPVIKKIKYYGNKLNAHLDITDDYPNSRNKVVKLSLKPYRFDVYLDNGVYKFVTVKNLDVIKKENYYEVNSKCYEEAKKLKKISNQAEFIASFYNNDLIKINGELYRVIGVNNDLLNRIEVNMIDITYREYLENMNDKRPPRIIKTIASKTQSIKKYSTDILGNLYEVKSKKHPQIIKKG

SEQ ID NO: 220 - protein, 1052 aa, Staphylococcus aureus
  REGION 1..1052: note = MISC_FEATURE - SaKKH Cas9 polypeptide sequence
KRNYILGLDIGITSVGYGIIDYETRDVIDAGVRLFKEANVENNEGRRSKRGARRLKRRRRHRIQRVKKLLFDYNLLTDHSELSGINPYEARVKGLSQKLSEEEFSAALLHLAKRRGVHNVNEVEEDTGNELSTKEQISRNSKALEEKYVAELQLERLKKDGEVRGSINRFKTSDYVKEAKQLLKVQKAYHQLDQSFIDTYIDLLETRRTYYEGPGEGSPFGWKDIKEWYEMLMGHCTYFPEELRSVKYAYNADLYNALNDLNNLVITRDENEKLEYYEKFQIIENVFKQKKKPTLKQIAKEILVNEEDIKGYRVTSTGKPEFTNLKVYHDIKDITARKEIIENAELLDQIAKILTIYQSSEDIQEELTNLNSELTQEEIEQISNLKGYTGTHNLSLKAINLILDELWHTNDNQIAIFNRLKLVPKKVDLSQQKEIPTTLVDDFILSPVVKRSFIQSIKVINAIIKKYGLPNDIIIELAREKNSKDAQKMINEMQKRNRQTNERIEEIIRTTGKENAKYLIEKIKLHDMQEGKCLYSLEAIPLEDLLNNPFNYEVDHIIPRSVSFDNSFNNKVLVKQEEASKKGNRTPFQYLSSSDSKISYETFKKHILNLAKGKGRISKTKKEYLLEERDINRFSVQKDFINRNLVDTRYATRGLMNLLRSYFRVNNLDVKVKSINGGFTSFLRRKWKFKKERNKGYKHHAEDALIIANADFIFKEWKKLDKAKKVMENQMFEEKQAESMPEIETEQEYKEIFITPHQIKHIKDFKDYKYSHRVDKKPNRKLINDTLYSTRKDDKGNTLIVNNLNGLYDKDNDKLKKLINKSPEKLLMYHHDPQTYQKLKLIMEQYGDEKNPLYKYYEETGNYLTKYSKKDNGPVIKKIKYYGNKLNAHLDITDDYPNSRNKVVKLSLKPYRFDVYLDNGVYKFVTVKNLDVIKKENYYEVNSKCYEEAKKLKKISNQAEFIASFYKNDLIKINGELYRVIGVNNDLLNRIEVNMIDITYREYLENMNDKRPPHIIKTIASKTQSIKKYSTDILGNLYEVKSKKHPQIIKKG

SEQ ID NO: 221 - protein, 707 aa, synthetic construct
  REGION 1..707: note = Casphi-1 polypeptide sequence
MADTPTLFTQFLRHHLPGQRFRKDILKQAGRILANKGEDATIAFLRGKSEESPPDFQPPVKCPIIACSRPLTEWPIYQASVAIQGYVYGQSLAEFEASDPGCSKDGLLGWFDKTGVCTDYFSVQGLNLIFQNARKRYIGVQTKVTNRNEKRHKKLKRINAKRIAEGLPELTSDEPESALDETGHLIDPPGLNTNIYCYQQVSPKPLALSEVNQLPTAYAGYSTSGDDPIQPMVTKDRLSISKGQPGYIPEHQRALLSQKKHRRMRGYGLKARALLVIVRIQDDWAVIDLRSLLRNAYWRRIVQTKEPSTITKLLKLVTGDPVLDATRMVATFTYKPGIVQVRSAKCLKNKQGSKLFSERYLNETVSVTSIDLGSNNLVAVATYRLVNGNTPELLQRFTLPSHLVKDFERYKQAHDTLEDSIQKTAVASLPQGQQTEIRMWSMYGFREAQERVCQELGLADGSIPWNVMTATSTILTDLFLARGGDPKKCMFTSEPKKKKNSKQVLYKIRDRAWAKMYRTLLSKETREAWNKALWGLKRGSPDYARLSKRKEELARRCVNYTISTAEKRAQCGRTIVALEDLNIGFFHGRGKQEPGWVGLFTRKKENRWLMQALHKAFLELAHHRGYHVIEVNPAYTSQTCPVCRHCDPDNRDQHNREAFHCIGCGFRGNADLDVATHNIAMVAITGESLKRARGSVASKTPQPLAAE

SEQ ID NO: 222 - protein, 757 aa, synthetic construct
  REGION 1..757: note = Casphi-2 polypeptide sequence
MPKPAVESEFSKVLKKHFPGERFRSSYMKRGGKILAAQGEEAVVAYLQGKSEEEPPNFQPPAKCHVVTKSRDFAEWPIMKASEAIQRYIYALSTTERAACKPGKSSESHAAWFAATGVSNHGYSHVQGLNLIFDHTLGRYDGVLKKVQLRNEKARARLESINASRADEGLPEIKAEEEEVATNETGHLLQPPGINPSFYVYQTISPQAYRPRDEIVLPPEYAGYVRDPNAPIPLGVVRNRCDIQKGCPGYIPEWQREAGTAISPKTGKAVTVPGLSPKKNKRMRRYWRSEKEKAQDALLVTVRIGTDWVVIDVRGLLRNARWRTIAPKDISLNALLDLFTGDPVIDVRRNIVTFTYTLDACGTYARKWTLKGKQTKATLDKLTATQTVALVAIDLGQTNPISAGISRVTQENGALQCEPLDRFTLPDDLLKDISAYRIAWDRNEEELRARSVEALPEAQQAEVRALDGVSKETARTQLCADFGLDPKRLPWDKMSSNTTFISEALLSNSVSRDQVFFTPAPKKGAKKKAPVEVMRKDRTWARAYKPRLSVEAQKLKNEALWALKRTSPEYLKLSRRKEELCRRSINYVIEKTRRRTQCQIVIPVIEDLNVRFFHGSGKRLPGWDNFFTAKKENRWFIQGLHKAFSDLRTHRSFYVFEVRPERTSITCPKCGHCEVGNRDGEAFQCLSCGKTCNADLDVATHNLTQVALTGKTMPKREEPRDAQGTAPARKTKKASKSKAPPAEREDQTPAQEPSQTS

SEQ ID NO: 223 - protein, 766 aa, synthetic construct
  REGION 1..766: note = Casphi-3 polypeptide sequence
MEKEITELTKIRREFPNKKFSSTDMKKAGKLLKAEGPDAVRDFLNSCQEIIGDFKPPVKTNIVSISRPFEEWPVSMVGRAIQEYYFSLTKEELESVHPGTSSEDHKSFFNITGLSNYNYTSVQGLNLIFKNAKAIYDGTLVKANNKNKKLEKKFNEINHKRSLEGLPIITPDFEEPFDENGHLNNPPGINRNIYGYQGCAAKVFVPSKHKMVSLPKEYEGYNRDPNLSLAGFRNRLEIPEGEPGHVPWFQRMDIPEGQIGHVNKIQRFNFVHGKNSGKVKFSDKTGRVKRYHHSKYKDATKPYKFLEESKKVSALDSILAIITIGDDWVVFDIRGLYRNVFYRELAQKGLTAVQLLDLFTGDPVIDPKKGVVTFSYKEGVVPVFSQKIVPRFKSRDTLEKLTSQGPVALLSVDLGQNEPVAARVCSLKNINDKITLDNSCRISFLDDYKKQIKDYRDSLDELEIKIRLEAINSLETNQQVEIRDLDVFSADRAKANTVDMFDIDPNLISWDSMSDARVSTQISDLYLKNGGDESRVYFEINNKRIKRSDYNISQLVRPKLSDSTRKNLNDSIWKLKRTSEEYLKLSKRKLELSRAVVNYTIRQSKLLSGINDIVIILEDLDVKKKFNGRGIRDIGWDNFFSSRKENRWFIPAFHKAFSELSSNRGLCVIEVNPAWTSATCPDCGFCSKENRDGINFTCRKCGVSYHADIDVATLNIARVAVLGKPMSGPADRERLGDTKKPRVARSRKTMKRKDISNSTVEAMVTA

SEQ ID NO: 224 - protein, 765 aa, synthetic construct
  REGION 1..765: note = Casphi-4 polypeptide sequence
MYSLEMADLKSEPSLLAKLLRDRFPGKYWLPKYWKLAEKKRLTGGEEAACEYMADKQLDSPPPNFRPPARCVILAKSRPFEDWPVHRVASKAQSFVIGLSEQGFAALRAAPPSTADARRDWLRSHGASEDDLMALEAQLLETIMGNAISLHGGVLKKIDNANVKAAKRLSGRNEARLNKGLQELPPEQEGSAYGADGLLVNPPGLNLNIYCRKSCCPKPVKNTARFVGHYPGYLRDSDSILISGTMDRLTIIEGMPGHIPAWQREQGLVKPGGRRRRLSGSESNMRQKVDPSTGPRRSTRSGTVNRSNQRTGRNGDPLLVEIRMKEDWVLLDARGLLRNLRWRESKRGLSCDHEDLSLSGLLALFSGDPVIDPVRNEVVFLYGEGIIPVRSTKPVGTRQSKKLLERQASMGPLTLISCDLGQTNLIAGRASAISLTHGSLGVRSSVRIELDPEIIKSFERLRKDADRLETEILTAAKETLSDEQRGEVNSHEKDSPQTAKASLCRELGLHPPSLPWGQMGPSTTFIADMLISHGRDDDAFLSHGEFPTLEKRKKFDKRFCLESRPLLSSETRKALNESLWEVKRTSSEYARLSQRKKEMARRAVNFVVEISRRKTGLSNVIVNIEDLNVRIFHGGGKQAPGWDGFFRPKSENRWFIQAIHKAFSDLAAHHGIPVIESDPQRTSMTCPECGHCDSKNRNGVRFLCKGCGASMDADFDAACRNLERVALTGKPMPKPSTSCERLLSATTGKVCSDHSLSHDAIEKAS

SEQ ID NO: 225 - protein, 793 aa, synthetic construct
  REGION 1..793: note = Casphi-5 polypeptide sequence
MSSLPTPLELLKQKHADLFKGLQFSSKDNKMAGKVLKKDGEEAALAFLSERGVSRGELPNFRPPAKTLVVAQSRPFEEFPIYRVSEAIQLYVYSLSVKELETVPSGSSTKKEHQRFFQDSSVPDFGYTSVQGLNKIFGLARGIYLGVITRGENQLQKAKSKHEALNKKRRASGEAETEFDPTPYEYMTPERKLAKPPGVNHSIMCYVDISVDEFDFRNPDGIVLPSEYAGYCREINTAIEKGTVDRLGHLKGGPGYIPGHQRKESTTEGPKINFRKGRIRRSYTALYAKRDSRRVRQGKLALPSYRHHMMRLNSNAESAILAVIFFGKDWVVFDLRGLLRNVRWRNLFVDGSTPSTLLGMFGDPVIDPKRGVVAFCYKEQIVPVVSKSITKMVKAPELLNKLYLKSEDPLVLVAIDLGQTNPVGVGVYRVMNASLDYEVVTRFALESELLREIESYRQRTNAFEAQIRAETFDAMTSEEQEEITRVRAFSASKAKENVCHRFGMPVDAVDWATMGSNTIHIAKWVMRHGDPSLVEVLEYRKDNEIKLDKNGVPKKVKLTDKRIANLTSIRLRFSQETSKHYNDTMWELRRKHPVYQKLSKSKADFSRRVVNSIIRRVNHLVPRARIVFIIEDLKNLGKVFHGSGKRELGWDSYFEPKSENRWFIQVLHKAFSETGKHKGYYIIECWPNWTSCTCPKCSCCDSENRHGEVFRCLACGYTCNTDFGTAPDNLVKIATTGKGLPGPKKRCKGSSKGKNPKIARSSETGVSVTESGAPKVKKSSPTQTSQSSSQSAP

SEQ ID NO: 226 - protein, 441 aa, synthetic construct
  REGION 1..441: note = Casphi-6 polypeptide sequence
MNKIEKEKTPLAKLMNENFAGLRFPFAIIKQAGKKLLKEGELKTIEYMTGKGSIEPLPNFKPPVKCLIVAKRRDLKYFPICKASCEIQSYVYSLNYKDFMDYFSTPMTSQKQHEEFFKKSGLNIEYQNVAGLNLIFNNVKNTYNGVILKVKNRNEKLKKKAIKNNYEFEEIKTFNDDGCLINKPGINNVIYCFQSISPKILKNITHLPKEYNDYDCSVDRNIIQKYVSRLDIPESQPGHVPEWQRKLPEFNNTNNPRRRRKWYSNGRNISKGYSVDQVNQAKIEDSLLAQIKIGEDWIILDIRGLLRDLNRRELISYKNKLTIKDVLGFFSDYPIIDIKKNLVTFCYKEGVIQVVSQKSIGNKKSKQLLEKLIENKPIALVSIDLGQTNPVSVKISKLNKINNKISIESFTYRFLNEEILKEIEKYRKDYDKLELKLINEA

SEQ ID NO: 227 - protein, 772 aa, synthetic construct
  REGION 1..772: note = Casphi-7 polypeptide sequence
MSNTAVSTREHMSNKTTPPSPLSLLLRAHFPGLKFESQDYKIAGKKLRDGGPEAVISYLTGKGQAKLKDVKPPAKAFVIAQSRPFIEWDLVRVSRQIQEKIFGIPATKGRPKQDGLSETAFNEAVASLEVDGKSKLNEETRAAFYEVLGLDAPSLHAQAQNALIKSAISIREGVLKKVENRNEKNLSKTKRRKEAGEEATFVEEKAHDERGYLIHPPGVNQTIPGYQAVVIKSCPSDFIGLPSGCLAKESAEALTDYLPHDRMTIPKGQPGYVPEWQHPLLNRRKNRRRRDWYSASLNKPKATCSKRSGTPNRKNSRTDQIQSGRFKGAIPVLMRFQDEWVIIDIRGLLRNARYRKLLKEKSTIPDLLSLFTGDPSIDMRQGVCTFIYKAGQACSAKMVKTKNAPEILSELTKSGPVVLVSIDLGQTNPIAAKVSRVTQLSDGQLSHETLLRELLSNDSSDGKEIARYRVASDRLRDKLANLAVERLSPEHKSEILRAKNDTPALCKARVCAALGLNPEMIAWDKMTPYTEFLATAYLEKGGDRKVATLKPKNRPEMLRRDIKFKGTEGVRIEVSPEAAEAYREAQWDLQRTSPEYLRLSTWKQELTKRILNQLRHKAAKSSQCEVVVMAFEDLNIKMMHGNGKWADGGWDAFFIKKRENRWFMQAFHKSLTELGAHKGVPTIEVTPHRTSITCTKCGHCDKANRDGERFACQKCGFVAHADLEIATDNIERVALTGKPMPKPESERSGDAKKSVGARKAAFKPEEDAEAAE

SEQ ID NO: 228 - protein, 717 aa, synthetic construct
  REGION 1..717: note = Casphi-8 polypeptide sequence
MIKPTVSQFLTPGFKLIRNHSRTAGLKLKNEGEEACKKFVRENEIPKDECPNFQGGPAIANIIAKSREFTEWEIYQSSLAIQEVIFTLPKDKLPEPILKEEWRAQWLSEHGLDTVPYKEAAGLNLIIKNAVNTYKGVQVKVDNKNKNNLAKINRKNEIAKLNGEQEISFEEIKAFDDKGYLLQKPSPNKSIYCYQSVSPKPFITSKYHNVNLPEEYIGYYRKSNEPIVSPYQFDRLRIPIGEPGYVPKWQYTFLSKKENKRRKLSKRIKNVSPILGIICIKKDWCVFDMRGLLRTNHWKKYHKPTDSINDLFDYFTGDPVIDTKANVVRFRYKMENGIVNYKPVREKKGKELLENICDQNGSCKLATVDVGQNNPVAIGLFELKKVNGELTKTLISRHPTPIDFCNKITAYRERYDKLESSIKLDAIKQLTSEQKIEVDNYNNNFTPQNTKQIVCSKLNINPNDLPWDKMISGTHFISEKAQVSNKSEIYFTSTDKGKTKDVMKSDYKWFQDYKPKLSKEVRDALSDIEWRLRRESLEFNKLSKSREQDARQLANWISSMCDVIGIENLVKKNNFFGGSGKREPGWDNFYKPKKENRWWINAIHKALTELSQNKGKRVILLPAMRTSITCPKCKYCDSKNRNGEKFNCLKCGIELNADIDVATENLATVAITAQSMPKPTCERSGDAKKPVRARKAKAPEFHDKLAPSYTVVLREAV

SEQ ID NO: 229 - protein, 793 aa, synthetic construct
  REGION 1..793: note = Casphi-9 polypeptide sequence
MRSSREIGDKILMRQPAEKTAFQVFRQEVIGTQKLSGGDAKTAGRLYKQGKMEAAREWLLKGARDDVPPNFQPPAKCLVVAVSHPFEEWDISKTNHDVQAYIYAQPLQAEGHLNGLSEKWEDTSADQHKLWFEKTGVPDRGLPVQAINKIAKAAVNRAFGVVRKVENRNEKRRSRDNRIAEHNRENGLTEVVREAPEVATNADGFLLHPPGIDPSILSYASVSPVPYNSSKHSFVRLPEEYQAYNVEPDAPIPQFVVEDRFAIPPGQPGYVPEWQRLKCSTNKHRRMRQWSNQDYKPKAGRRAKPLEFQAHLTRERAKGALLVVMRIKEDWVVFDVRGLLRNVEWRKVLSEEAREKLTLKGLLDLFTGDPVIDTKRGIVTFLYKAEITKILSKRTVKTKNARDLLLRLTEPGEDGLRREVGLVAVDLGQTHPIAAAIYRIGRTSAGALESTVLHRQGLREDQKEKLKEYRKRHTALDSRLRKEAFETLSVEQQKEIVTVSGSGAQITKDKVCNYLGVDPSTLPWEKMGSYTHFISDDFLRRGGDPNIVHFDRQPKKGKVSKKSQRIKRSDSQWVGRMRPRLSQETAKARMEADWAAQNENEEYKRLARSKQELARWCVNTLLQNTRCITQCDEIVVVIEDLNVKSLHGKGAREPGWDNFFTPKTENRWFIQILHKTFSELPKHRGEHVIEGCPLRTSITCPACSYCDKNSRNGEKFVCVACGATFHADFEVATYNLVRLATTGMPMPKSLERQGGGEKAGGARKARKKAKQVEKIVVQANANVTMNGASLHSP

SEQ ID NO: 230 - protein, 812 aa, synthetic construct
  REGION 1..812: note = Casphi-10 polypeptide sequence
MDMLDTETNYATETPAQQQDYSPKPPKKAQRAPKGFSKKARPEKKPPKPITLFTQKHFSGVRFLKRVIRDASKILKLSESRTITFLEQAIERDGSAPPDVTPPVHNTIMAVTRPFEEWPEVILSKALQKHCYALTKKIKIKTWPKKGPGKKCLAAWSARTKIPLIPGQVQATNGLFDRIGSIYDGVEKKVTNRNANKKLEYDEAIKEGRNPAVPEYETAYNIDGTLINKPGYNPNLYITQSRTPRLITEADRPLVEKILWQMVEKKTQSRNQARRARLEKAAHLQGLPVPKFVPEKVDRSQKIEIRIIDPLDKIEPYMPQDRMAIKASQDGHVPYWQRPFLSKRRNRRVRAGWGKQVSSIQAWLTGALLVIVRLGNEAFLADIRGALRNAQWRKLLKPDATYQSLFNLFTGDPVVNTRTNHLTMAYREGVVNIVKSRSFKGRQTREHLLTLLGQGKTVAGVSFDLGQKHAAGLLAAHFGLGEDGNPVFTPIQACFLPQRYLDSLTNYRNRYDALTLDMRRQSLLALTPAQQQEFADAQRDPGGQAKRACCLKLNLNPDEIRWDLVSGISTMISDLYIERGGDPRDVHQQVETKPKGKRKSEIRILKIRDGKWAYDFRPKIADETRKAQREQLWKLQKASSEFERLSRYKINIARAIANWALQWGRELSGCDIVIPVLEDLNVGSKFFDGKGKWLLGWDNRFTPKKENRWFIKVLHKAVAELAPHRGVPVYEVMPHRTSMTCPACHYCHPTNREGDRFECQSCHVVKNTDRDVAPYNILRVAVEGKTLDRWQAEKKPQAEPDRPMILIDNQES

SEQ ID NO: 231 - protein, 84 aa, synthetic construct
  REGION 1..84: note = synthetic polypeptide sequence
MTNLSDIIEKETGKQLVIQESILMLPEEVEEVIGNKPESDILVHTAYDESTDENVMLLTSDAPEYKPWALVIQDSNGENKIKML

SEQ ID NO: 232 - protein, 1129 aa, Alicyclobacillus acidoterrestris
  REGION 1..1129: note = MISC_FEATURE - Cas12b/C2c1; sp|T0D7A2|C2C1_ALIAG CRISPR-associated endonuclease C2c1 OS = Alicyclobacillus acido-terrestris (strain ATCC 49025 /DSM 3922/ CIP 106132 / NCIMB 13137/GD3B) GN=c2c1 PE=1 SV=1; Cas12b/C2c1 polypeptide sequence
MAVKSIKVKLRLDDMPEIRAGLWKLHKEVNAGVRYYTEWLSLLRQENLYRRSPNGDGEQECDKTAEECKAELLERLRARQVENGHRGPAGSDDELLQLARQLYELLVPQAIGAKGDAQQIARKFLSPLADKDAVGGLGIAKAGNKPRWVRMREAGEPGWEEEKEKAETRKSADRTADVLRALADFGLKPLMRVYTDSEMSSVEWKPLRKGQAVRTWDRDMFQQAIERMMSWESWNQRVGQEYAKLVEQKNRFEQKNFVGQEHLVHLVNQLQQDMKEASPGLESKEQTAHYVTGRALRGSDKVFEKWGKLAPDAPFDLYDAEIKNVQRRNTRRFGSHDLFAKLAEPEYQALWREDASFLTRYAVYNSILRKLNHAKMFATFTLPDATAHPIWTRFDKLGGNLHQYTFLFNEFGERRHAIRFHKLLKVENGVAREVDDVTVPISMSEQLDNLLPRDPNEPIALYFRDYGAEQHFTGEFGGAKIQCRRDQLAHMHRRRGARDVYLNVSVRVQSQSEARGERRPPYAAVFRLVGDNHRAFVHFDKLSDYLAEHPDDGKLGSEGLLSGLRVMSVDLGLRTSASISVFRVARKDELKPNSKGRVPFFFPIKGNDNLVAVHERSQLLKLPGETESKDLRAIREERQRTLRQLRTQLAYLRLLVRCGSEDVGRRERSWAKLIEQPVDAANHMTPDWREAFENELQKLKSLHGICSDKEWMDAVYESVRRVWRHMGKQVRDWRKDVRSGERPKIRGYAKDVVGGNSIEQIEYLERQYKFLKSWSFFGKVSGQVIRAEKGSRFAITLREHIDHAKEDRLKKLADRIIMEALGYVYALDERGKGKWVAKYPPCQLILLEELSEYQFNNDRPPSENNQLMQWSHRGVFQELINQAQVHDLLVGTMYAAFSSRFDARTGAPGIRCRRVPARCTQEHNPEPFPWWLNKFVVEHTLDACPLRADDLIPTGEGEIFVSPFSAEEGDFHQIHADLNAAQNLQQRLWSDFDISQIRLRCDWGEVDGELVLIPRLTGKRTADSYSNKVFYTNTGVTYYERERGKKRRKVFAQEKLSEEEAELLVEADEAREKSVVLMRDPSGIINRGNWTRQKEFWSMVNQRIEGYLVKQIRSRVPLQDSACENTGDI

SEQ ID NO: 233 - protein, 1368 aa, Mus musculus
  REGION 1..1368: note = MISC_FEATURE - high fidelity Cas9 polypeptide sequence
MDKKYSIGLAIGTNSVGWAVITDEYKVPSKKFKVLGNTDRHSIKKNLIGALLFDSGETAEATRLKRTARRRYTRRKNRICYLQEIFSNEMAKVDDSFFHRLEESFLVEEDKKHERHPIFGNIVDEVAYHEKYPTIYHLRKKLVDSTDKADLRLIYLALAHMIKFRGHFLIEGDLNPDNSDVDKLFIQLVQTYNQLFEENPINASGVDAKAILSARLSKSRRLENLIAQLPGEKKNGLFGNLIALSLGLTPNFKSNFDLAEDAKLQLSKDTYDDDLDNLLAQIGDQYADLFLAAKNLSDAILLSDILRVNTEITKAPLSASMIKRYDEHHQDLTLLKALVRQQLPEKYKEIFFDQSKNGYAGYIDGGASQEEFYKFIKPILEKMDGTEELLVKLNREDLLRKQRTFDNGSIPHQIHLGELHAILRRQEDFYPFLKDNREKIEKILTFRIPYYVGPLARGNSRFAWMTRKSEETITPWNFEEVVDKGASAQSFIERMTAFDKNLPNEKVLPKHSLLYEYFTVYNELTKVKYVTEGMRKPAFLSGEQKKAIVDLLFKTNRKVTVKQLKEDYFKKIECFDSVEISGVEDRFNASLGTYHDLLKIIKDKDFLDNEENEDILEDIVLTLTLFEDREMIEERLKTYAHLFDDKVMKQLKRRRYTGWGALSRKLINGIRDKQSGKTILDFLKSDGFANRNFMALIHDDSLTFKEDIQKAQVSGQGDSLHEHIANLAGSPAIKKGILQTVKVVDELVKVMGRHKPENIVIEMARENQTTQKGQKNSRERMKRIEEGIKELGSQILKEHPVENTQLQNEKLYLYYLQNGRDMYVDQELDINRLSDYDVDHIVPQSFLKDDSIDNKVLTRSDKNRGKSDNVPSEEVVKKMKNYWRQLLNAKLITQRKFDNLTKAERGGLSELDKAGFIKRQLVETRAITKHVAQILDSRMNTKYDENDKLIREVKVITLKSKLVSDFRKDFQFYKVREINNYHHAHDAYLNAVVGTALIKKYPKLESEFVYGDYKVYDVRKMIAKSEQEIGKATAKYFFYSNIMNFFKTEITLANGEIRKRPLIETNGETGEIVWDKGRDFATVRKVLSMPQVNIVKKTEVQTGGFSKESILPKRNSDKLIARKKDWDPKKYGGFDSPTVAYSVLVVAKVEKGKSKKLKSVKELLGITIMERSSFEKNPIDFLEAKGYKEVKKDLIIKLPKYSLFELENGRKRMLASAGELQKGNELALPSKYVNFLYLASHYEKLKGSPEDNEQKQLFVEQHKHYLDEIIEQISEFSKRVILADANLDKVLSAYNKHRDKPIREQAENIIHLFTLTNLGAPAAFKYFDTTIDRKRYTSTKEVLDATLIHQSITGLYETRIDLSQLGGD

SEQ ID NO: 234 - protein, 1368 aa, Streptococcus pyogenes
  REGION 1..1368: note = MISC_FEATURE - PAM-binding SpEQR Cas9 polypeptide sequence
MDKKYSIGLAIGTNSVGWAVITDEYKVPSKKFKVLGNTDRHSIKKNLIGALLFDSGETAEATRLKRTARRRYTRRKNRICYLQEIFSNEMAKVDDSFFHRLEESVLVEEDKKHERHPIFGNIVDEVAYHEKYPTIYHLRKKLVDSTDKADLRLIYLALAHMIKFRGHFLIEGDLNPDNSDVDKLFIQLVQTYNQLFEENPINASGVDAKAILSARLSKSRRLENLIAQLPGEKKNGLFGNLIALSLGLTPNFKSNFDLAEDAKLQLSKDTYDDDLDNLLAQIGDQYADLFLAAKNLSDAILLSDILRVNTEITKAPLSASMIKRYDEHHQDLTLLKALVRQQLPEKYKEIFFDQSKNGYAGYIDGGASQEEFYKFIKPILEKMDGTEELLVKLNREDLLRKQRTFDNGSIPHQIHLGELHAILRRQEDFYPFLKDNREKIEKILTFRIPYYVGPLARGNSRFAWMTRKSEETITPWNFEEVVDKGASAQSFIERMTNFDKNLPNEKVLPKHSLLYEYFTVYNELTKVKYVTEGMRKPAFLSGEQKKAIVDLLFKTNRKVTVKQLKEDYFKKIECFDSVEISGVEDRFNASLGTYHDLLKIIKDKDFLDNEENEDILEDIVLTLTLFEDREMIEERLKTYAHLFDDKVMKQLKRRRYTGWGRLSRKLINGIRDKQSGKTILDFLKSDGFANRNFMQLIHDDSLTFKEDIQKAQVSGQGDSLHEHIANLAGSPAIKKGILQTVKVVDELVKVMGRHKPENIVIEMARENQTTQKGQKNSRERMKRIEEGIKELGSQILKEHPVENTQLQNEKLYLYYLQNGRDMYVDQELDINRLSDYDVDHIVPQSFLKDDSIDNKVLTRSDKNRGKSDNVPSEEVVKKMKNYWRQLLNAKLITQRKFDNLTKAERGGLSELDKAGFIKRQLVETRQITKHVAQILDSRMNTKYDENDKLIREVKVITLKSKLVSDFRKDFQFYKVREINNYHHAHDAYLNAVVGTALIKKYPKLESEFVYGDYKVYDVRKMIAKSEQEIGKATAKYFFYSNIMNFFKTEITLANGEIRKRPLIETNGETGEIVWDKGRDFATVRKVLSMPQVNIVKKTEVQTGGFSKESILPKRNSDKLIARKKDWDPKKYGGFESPTVAYSVLVVAKVEKGKSKKLKSVKELLGITIMERSSFEKNPIDFLEAKGYKEVKKDLIIKLPKYSLFELENGRKRMLASAGELQKGNELALPSKYVNFLYLASHYEKLKGSPEDNEQKQLFVEQHKHYLDEIIEQISEFSKRVILADANLDKVLSAYNKHRDKPIREQAENIIHLFTLTNLGAPAAFKYFDTTIDRKQYRSTKEVLDATLIHQSITGLYETRIDLSQLGGD

SEQ ID NO: 235 - protein, 1368 aa, Streptococcus pyogenes
  REGION 1..1368: note = MISC_FEATURE - PAM-binding SpVQR Cas9 polypeptide sequence
MDKKYSIGLAIGTNSVGWAVITDEYKVPSKKFKVLGNTDRHSIKKNLIGALLFDSGETAEATRLKRTARRRYTRRKNRICYLQEIFSNEMAKVDDSFFHRLEESFLVEEDKKHERHPIFGNIVDEVAYHEKYPTIYHLRKKLVDSTDKADLRLIYLALAHMIKFRGHFLIEGDLNPDNSDVDKLFIQLVQTYNQLFEENPINASGVDAKAILSARLSKSRRLENLIAQLPGEKKNGLFGNLIALSLGLTPNFKSNFDLAEDAKLQLSKDTYDDDLDNLLAQIGDQYADLFLAAKNLSDAILLSDILRVNTEITKAPLSASMIKRYDEHHQDLTLLKALVRQQLPEKYKEIFFDQSKNGYAGYIDGGASQEEFYKFIKPILEKMDGTEELLVKLNREDLLRKQRTFDNGSIPHQIHLGELHAILRRQEDFYPFLKDNREKIEKILTFRIPYYVGPLARGNSRFAWMTRKSEETITPWNFEEVVDKGASAQSFIERMTNFDKNLPNEKVLPKHSLLYEYFTVYNELTKVKYVTEGMRKPAFLSGEQKKAIVDLLFKTNRKVTVKQLKEDYFKKIECFDSVEISGVEDRFNASLGTYHDLLKIIKDKDFLDNEENEDILEDIVLTLTLFEDREMIEERLKTYAHLFDDKVMKQLKRRRYTGWGRLSRKLINGIRDKQSGKTILDFLKSDGFANRNFMQLIHDDSLTFKEDIQKAQVSGQGDSLHEHIANLAGSPAIKKGILQTVKVVDELVKVMGRHKPENIVIEMARENQTTQKGQKNSRERMKRIEEGIKELGSQILKEHPVENTQLQNEKLYLYYLQNGRDMYVDQELDINRLSDYDVDHIVPQSFLKDDSIDNKVLTRSDKNRGKSDNVPSEEVVKKMKNYWRQLLNAKLITQRKFDNLTKAERGGLSELDKAGFIKRQLVETRQITKHVAQILDSRMNTKYDENDKLIREVKVITLKSKLVSDFRKDFQFYKVREINNYHHAHDAYLNAVVGTALIKKYPKLESEFVYGDYKVYDVRKMIAKSEQEIGKATAKYFFYSNIMNFFKTEITLANGEIRKRPLIETNGETGEIVWDKGRDFATVRKVLSMPQVNIVKKTEVQTGGFSKESILPKRNSDKLIARKKDWDPKKYGGFVSPTVAYSVLVVAKVEKGKSKKLKSVKELLGITIMERSSFEKNPIDFLEAKGYKEVKKDLIIKLPKYSLFELENGRKRMLASAGELQKGNELALPSKYVNFLYLASHYEKLKGSPEDNEQKQLFVEQHKHYLDEIIEQISEFSKRVILADANLDKVLSAYNKHRDKPIREQAENIIHLFTLTNLGAPAAFKYFDTTIDRKQYRSTKEVLDATLIHQSITGLYETRIDLSQLGGD

SEQ ID NO: 236 - protein, 1368 aa, Streptococcus pyogenes
  REGION 1..1368: note = MISC_FEATURE - SpVQR Cas9 polypeptide sequence
MDKKYSIGLAIGTNSVGWAVITDEYKVPSKKFKVLGNTDRHSIKKNLIGALLFDSGETAEATRLKRTARRRYTRRKNRICYLQEIFSNEMAKVDDSFFHRLEESFLVEEDKKHERHPIFGNIVDEVAYHEKYPTIYHLRKKLVDSTDKADLRLIYLALAHMIKFRGHFLIEGDLNPDNSDVDKLFIQLVQTYNQLFEENPINASGVDAKAILSARLSKSRRLENLIAQLPGEKKNGLFGNLIALSLGLTPNFKSNFDLAEDAKLQLSKDTYDDDLDNLLAQIGDQYADLFLAAKNLSDAILLSDILRVNTEITKAPLSASMIKRYDEHHQDLTLLKALVRQQLPEKYKEIFFDQSKNGYAGYIDGGASQEEFYKFIKPILEKMDGTEELLVKLNREDLLRKQRTFDNGSIPHQIHLGELHAILRRQEDFYPFLKDNREKIEKILTFRIPYYVGPLARGNSRFAWMTRKSEETITPWNFEEVVDKGASAQSFIERMTNFDKNLPNEKVLPKHSLLYEYFTVYNELTKVKYVTEGMRKPAFLSGEQKKAIVDLLFKTNRKVTVKQLKEDYFKKIECFDSVEISGVEDRFNASLGTYHDLLKIIKDKDFLDNEENEDILEDIVLTLTLFEDREMIEERLKTYAHLFDDKVMKQLKRRRYTGWGRLSRKLINGIRDKQSGKTILDFLKSDGFANRNFMQLIHDDSLTFKEDIQKAQVSGQGDSLHEHIANLAGSPAIKKGILQTVKVVDELVKVMGRHKPENIVIEMARENQTTQKGQKNSRERMKRIEEGIKELGSQILKEHPVENTQLQNEKLYLYYLQNGRDMYVDQELDINRLSDYDVDHIVPQSFLKDDSIDNKVLTRSDKNRGKSDNVPSEEVVKKMKNYWRQLLNAKLITQRKFDNLTKAERGGLSELDKAGFIKRQLVETRQITKHVAQILDSRMNTKYDENDKLIREVKVITLKSKLVSDFRKDFQFYKVREINNYHHAHDAYLNAVVGTALIKKYPKLESEFVYGDYKVYDVRKMIAKSEQEIGKATAKYFFYSNIMNFFKTEITLANGEIRKRPLIETNGETGEIVWDKGRDFATVRKVLSMPQVNIVKKTEVQTGGFSKESILPKRNSDKLIARKKDWDPKKYGGFVSPTVAYSVLVVAKVEKGKSKKLKSVKELLGITIMERSSFEKNPIDFLEAKGYKEVKKDLIIKLPKYSLFELENGRKRMLASARELQKGNELALPSKYVNFLYLASHYEKLKGSPEDNEQKQLFVEQHKHYLDEIIEQISEFSKRVILADANLDKVLSAYNKHRDKPIREQAENIIHLFTLTNLGAPAAFKYFDTTIDRKEYRSTKEVLDATLIHQSITGLYETRIDLSQLGGD

SEQ ID NO: 237 - protein, 1359 aa, Streptococcus macacae
  REGION 1..1359: note = MISC_FEATURE - SpyMacCas9 polypeptide sequence
MDKKYSIGLDIGTNSVGWAVITDDYKVPSKKFKVLGNTDRHSIKKNLIGALLFGSGETAEATRLKRTARRRYTRRKNRICYLQEIFSNEMAKVDDSFFHRLEESFLVEEDKKHERHPIFGNIVDEVAYHEKYPTIYHLRKKLADSTDKADLRLIYLALAHMIKFRGHFLIEGDLNPDNSDVDKLFIQLVQIYNQLFEENPINASRVDAKAILSARLSKSRRLENLIAQLPGEKRNGLFGNLIALSLGLTPNFKSNFDLAEDAKLQLSKDTYDDDLDNLLAQIGDQYADLFLAAKNLSDAILLSDILRVNSEITKAPLSASMIKRYDEHHQDLTLLKALVRQQLPEKYKEIFFDQSKNGYAGYIDGGASQEEFYKFIKPILEKMDGTEELLVKLNREDLLRKQRTFDNGSIPHQIHLGELHAILRRQEDFYPFLKDNREKIEKILTFRIPYYVGPLARGNSRFAWMTRKSEETITPWNFEEVVDKGASAQSFIERMTNFDKNLPNEKVLPKHSLLYEYFTVYNELTKVKYVTEGMRKPAFLSGEQKKAIVDLLFKTNRKVTVKQLKEDYFKKIECFDSVEISGVEDRFNASLGAYHDLLKIIKDKDFLDNEENEDILEDIVLTLTLFEDRGMIEERLKTYAHLFDDKVMKQLKRRRYTGWGRLSRKLINGIRDKQSGKTILDFLKSDGFANRNFMQLIHDDSLTFKEDIQKAQVSGQGHSLHEQIANLAGSPAIKKGILQTVKIVDELVKVMGHKPENIVIEMARENQTTQKGQKNSRERMKRIEEGIKELGSQILKEHPVENTQLQNEKLYLYYLQNGRDMYVDQELDINRLSDYDVDHIVPQSFIKDDSIDNKVLTRSDKNRGKSDNVPSEEVVKKMKNYWRQLLNAKLITQRKFDNLTKAERGGLSELDKAGFIKRQLVETRQITKHVAQILDSRMNTKYDENDKLIREVKVITLKSKLVSDFRKDFQFYKVREINNYHHAHDAYLNAVVGTALIKKYPKLESEFVYGDYKVYDVRKMIAKSEQEIGKATAKYFFYSNIMNFFKTEITLANGEIRKRPLIETNGETGEIVWDKGRDFATVRKVLSMPQVNIVKKTEIQTVGQNGGLFDDNPKSPLEVTPSKLVPLKKELNPKKYGGYQKPTTAYPVLLITDTKQLIPISVMNKKQFEQNPVKFLRDRGYQQVGKNDFIKLPKYTLVDIGDGIKRLWASSKEIHKGNQLVVSKKSQILLYHAHHLDSDLSNDYLQNHNQQFDVLFNEIISFSKKCKLGKEHIQKIENVYSNKKNSASIEELAESFIKLLGFTQLGATSPFNFLGVKLNQKQYKGKKDYILPCTEGTLIRQSITGLYETRVDLSKIGED

SEQ ID NO: 238 - protein, 1410 aa, synthetic construct
  REGION 1..1410: note = CP5 polypeptide sequence
  REGION 1..341: note = MISC_FEATURE - Sequence derived from Cas9
  REGION 342..362: note = MISC_FEATURE - Linker sequence
  REGION 363..1388: note = MISC_FEATURE - Sequence derived from Cas9
  REGION 1389..1410: note = MISC_FEATURE - Bipartite nuclear localization sequence
EIGKATAKYFFYSNIMNFFKTEITLANGEIRKRPLIETNGETGEIVWDKGRDFATVRKVLSMPQVNIVKKTEVQTGGFSKESILPKRNSDKLIARKKDWDPKKYGGFMQPTVAYSVLVVAKVEKGKSKKLKSVKELLGITIMERSSFEKNPIDFLEAKGYKEVKKDLIIKLPKYSLFELENGRKRMLASAKFLQKGNELALPSKYVNFLYLASHYEKLKGSPEDNEQKQLFVEQHKHYLDEIIEQISEFSKRVILADANLDKVLSAYNKHRDKPIREQAENIIHLFTLTNLGAPRAFKYFDTTIARKEYRSTKEVLDATLIHQSITGLYETRIDLSQLGGDGGSGGSGGSGGSGGSGGSGGMDKKYSIGLAIGTNSVGWAVITDEYKVPSKKFKVLGNTDRHSIKKNLIGALLFDSGETAEATRLKRTARRRYTRRKNRICYLQEIFSNEMAKVDDSFFHRLEESFLVEEDKKHERHPIFGNIVDEVAYHEKYPTIYHLRKKLVDSTDKADLRLIYLALAHMIKFRGHFLIEGDLNPDNSDVDKLFIQLVQTYNQLFEENPINASGVDAKAILSARLSKSRRLENLIAQLPGEKKNGLFGNLIALSLGLTPNFKSNFDLAEDAKLQLSKDTYDDDLDNLLAQIGDQYADLFLAAKNLSDAILLSDILRVNTEITKAPLSASMIKRYDEHHQDLTLLKALVRQQLPEKYKEIFFDQSKNGYAGYIDGGASQEEFYKFIKPILEKMDGTEELLVKLNREDLLRKQRTFDNGSIPHQIHLGELHAILRRQEDFYPFLKDNREKIEKILTFRIPYYVGPLARGNSRFAWMTRKSEETITPWNFEEVVDKGASAQSFIERMTNFDKNLPNEKVLPKHSLLYEYFTVYNELTKVKYVTEGMRKPAFLSGEQKKAIVDLLFKTNRKVTVKQLKEDYFKKIECFDSVEISGVEDRFNASLGTYHDLLKIIKDKDFLDNEENEDILEDIVLTLTLFEDREMIEERLKTYAHLFDDKVMKQLKRRRYTGWGRLSRKLINGIRDKQSGKTILDFLKSDGFANRNFMQLIHDDSLTFKEDIQKAQVSGQGDSLHEHIANLAGSPAIKKGILQTVKVVDELVKVMGRHKPENIVIEMARENQTTQKGQKNSRERMKRIEEGIKELGSQILKEHPVENTQLQNEKLYLYYLQNGRDMYVDQELDINRLSDYDVDHIVPQSFLKDDSIDNKVLTRSDKNRGKSDNVPSEEVVKKMKNYWRQLLNAKLITQRKFDNLTKAERGGLSELDKAGFIKRQLVETRQITKHVAQILDSRMNTKYDENDKLIREVKVITLKSKLVSDFRKDFQFYKVREINNYHHAHDAYLNAVVGTALIKKYPKLESEFVYGDYKVYDVRKMIAKSEQEGADKRTADGSEFESPKKKRKV

SEQ ID NO: 239 - protein, 1302 aa, synthetic construct
  REGION 1..1302: note = Cas12c1 polypeptide sequence
MQTKKTHLHLISAKASRKYRRTIACLSDTAKKDLERRKQSGAADPAQELSCLKTIKFKLEVPEGSKLPSFDRISQIYNALETIEKGSLSYLLFALILSGFRIFPNSSAAKTFASSSCYKNDQFASQIKEIFGEMVKNFIPSELESILKKGRRKNNKDWTEENIKRVLNSEFGRKNSEGSSALFDSFLSKFSQELFRKFDSWNEVNKKYLEAAELLDSMLASYGPFDSVCKMIGDSDSRNSLPDKSTIAFTNNAEITVDIESSVMPYMAIAALLREYRQSKSKAAPVAYVQSHLTTTNGNGLSWFFKFGLDLIRKAPVSSKQSTSDGSKSLQELFSVPDDKLDGLKFIKEACEALPEASLLCGEKGELLGYQDFRTSFAGHIDSWVANYVNRLFELIELVNQLPESIKLPSILTQKNHNLVASLGLQEAEVSHSLELFEGLVKNVRQTLKKLAGIDISSSPNEQDIKEFYAFSDVLNRLGSIRNQIENAVQTAKKDKIDLESAIEWKEWKKLKKLPKLNGLGGGVPKQQELLDKALESVKQIRHYQRIDFERVIQWAVNEHCLETVPKFLVDAEKKKINKESSTDFAAKENAVRFLLEGIGAAARGKTDSVSKAAYNWFVVNNFLAKKDLNRYFINCQGCIYKPPYSKRRSLAFALRSDNKDTIEVVWEKFETFYKEISKEIEKFNIFSQEFQTFLHLENLRMKLLLRRIQKPIPAEIAFFSLPQEYYDSLPPNVAFLALNQEITPSEYITQFNLYSSFLNGNLILLRRSRSYLRAKFSWVGNSKLIYAAKEARLWKIPNAYWKSDEWKMILDSNVLVFDKAGNVLPAPTLKKVCEREGDLRLFYPLLRQLPHDWCYRNPFVKSVGREKNVIEVNKEGEPKVASALPGSLFRLIGPAPFKSLLDDCFFNPLDKDLRECMLIVDQEISQKVEAQKVEASLESCTYSIAVPIRYHLEEPKVSNQFENVLAIDQGEAGLAYAVFSLKSIGEAETKPIAVGTIRIPSIRRLIHSVSTYRKKKQRLQNFKQNYDSTAFIMRENVTGDVCAKIVGLMKEFNAFPVLEYDVKNLESGSRQLSAVYKAVNSHFLYFKEPGRDALRKQLWYGGDSWTIDGIEIVTRERKEDGKEGVEKIVPLKVFPGRSVSARFTSKTCSCCGRNVFDWLFTEKKAKTNKKFNVNSKGELTTADGVIQLFEADRSKGPKFYARRKERTPLTKPIAKGSYSLEEIERRVRTNLRRAPKSKQSRDTSQSQYFCVYKDCALHFSGMQADENAAINIGRRFLTALRKNRRSDFPSNVKISDRLLDN

SEQ ID NO: 240 - protein, 1218 aa, synthetic construct
  REGION 1..1218: note = Cas12c2 polypeptide sequence
MTKHSIPLHAFRNSGADARKWKGRIALLAKRGKETMRTLQFPLEMSEPEAAAINTTPFAVAYNAIEGTGKGTLFDYWAKLHLAGFRFFPSGGAATIFRQQAVFEDASWNAAFCQQSGKDWPWLVPSKLYERFTKAPREVAKKDGSKKSIEFTQENVANESHVSLVGASITDKTPEDQKEFFLKMAGALAEKFDSWKSANEDRIVAMKVIDEFLKSEGLHLPSLENIAVKCSVETKPDNATVAWHDAPMSGVQNLAIGVFATCASRIDNIYDLNGGKLSKLIQESATTPNVTALSWLFGKGLEYFRTTDIDTIMQDFNIPASAKESIKPLVESAQAIPTMTVLGKKNYAPFRPNFGGKIDSWIANYASRLMLLNDILEQIEPGFELPQALLDNETLMSGIDMTGDELKELIEAVYAWVDAAKQGLATLLGRGGNVDDAVQTFEQFSAMMDTLNGTLNTISARYVRAVEMAGKDEARLEKLIECKFDIPKWCKSVPKLVGISGGLPKVEEEIKVMNAAFKDVRARMFVRFEEIAAYVASKGAGMDVYDALEKRELEQIKKLKSAVPERAHIQAYRAVLHRIGRAVQNCSEKTKQLFSSKVIEMGVFKNPSHLNNFIFNQKGAIYRSPFDRSRHAPYQLHADKLLKNDWLELLAEISATLMASESTEQMEDALRLERTRLQLQLSGLPDWEYPASLAKPDIEVEIQTALKMQLAKDTVTSDVLQRAFNLYSSVLSGLTFKLLRRSFSLKMRFSVADTTQLIYVPKVCDWAIPKQYLQAEGEIGIAARVVTESSPAKMVTEVEMKEPKALGHFMQQAPHDWYFDASLGGTQVAGRIVEKGKEVGKERKLVGYRMRGNSAYKTVLDKSLVGNTELSQCSMIIEIPYTQTVDADFRAQVQAGLPKVSINLPVKETITASNKDEQMLFDRFVAIDLGERGLGYAVFDAKTLELQESGHRPIKAITNLLNRTHHYEQRPNQRQKFQAKFNVNLSELRENTVGDVCHQINRICAYYNAFPVLEYMVPDRLDKQLKSVYESVTNRYIWSSTDAHKSARVQFWLGGETWEHPYLKSAKDKKPLVLSPGRGASGKGTSQTCSCCGRNPFDLIKDMKPRAKIAVVDGKAKLENSELKLFERNLESKDDMLARRHRNERAGMEQPLTPGNYTVDEIKALLRANLRRAPKNRRTKDTTVSEYHCVFSDCGKTMHADENAAVNIGGKFIADIEK

SEQ ID NO: 241 - protein, 1252 aa, Oleiphilus sp.
  REGION 1..1252: note = MISC_FEATURE - OspCas12c polypeptide sequence
MTKLRHRQKKLTHDWAGSKKREVLGSNGKLQNPLLMPVKKGQVTEFRKAFSAYARATKGEMTDGRKNMFTHSFEPFKTKPSLHQCELADKAYQSLHSYLPGSLAHFLLSAHALGFRIFSKSGEATAFQASSKIEAYESKLASELACVDLSIQNLTISTLFNALTTSVRGKGEETSADPLIARFYTLLTGKPLSRDTQGPERDLAEVISRKIASSFGTWKEMTANPLQSLQFFEEELHALDANVSLSPAFDVLIKMNDLQGDLKNRTIVFDPDAPVFEYNAEDPADIIIKLTARYAKEAVIKNQNVGNYVKNAITTTNANGLGWLLNKGLSLLPVSTDDELLEFIGVERSHPSCHALIELIAQLEAPELFEKNVFSDTRSEVQGMIDSAVSNHIARLSSSRNSLSMDSEELERLIKSFQIHTPHCSLFIGAQSLSQQLESLPEALQSGVNSADILLGSTQYMLTNSLVEESIATYQRTLNRINYLSGVAGQINGAIKRKAIDGEKIHLPAAWSELISLPFIGQPVIDVESDLAHLKNQYQTLSNEFDTLISALQKNFDLNFNKALLNRTQHFEAMCRSTKKNALSKPEIVSYRDLLARLTSCLYRGSLVLRRAGIEVLKKHKIFESNSELREHVHERKHFVFVSPLDRKAKKLLRLTDSRPDLLHVIDEILQHDNLENKDRESLWLVRSGYLLAGLPDQLSSSFINLPIITQKGDRRLIDLIQYDQINRDAFVMLVTSAFKSNLSGLQYRANKQSFVVTRTLSPYLGSKLVYVPKDKDWLVPSQMFEGRFADILQSDYMVWKDAGRLCVIDTAKHLSNIKKSVFSSEEVLAFLRELPHRTFIQTEVRGLGVNVDGIAFNNGDIPSLKTFSNCVQVKVSRTNTSLVQTLNRWFEGGKVSPPSIQFERAYYKKDDQIHEDAAKRKIRFQMPATELVHASDDAGWTPSYLLGIDPGEYGMGLSLVSINNGEVLDSGFIHINSLINFASKKSNHQTKVVPRQQYKSPYANYLEQSKDSAAGDIAHILDRLIYKLNALPVFEALSGNSQSAADQVWTKVLSFYTWGDNDAQNSIRKQHWFGASHWDIKGMLRQPPTEKKPKPYIAFPGSQVSSYGNSQRCSCCGRNPIEQLREMAKDTSIKELKIRNSEIQLFDGTIKLFNPDPSTVIERRRHNLGPSRIPVADRTFKNISPSSLEFKELITIVSRSIRHSPEFIAKKRGIGSEYFCAYSDCNSSLNSEANAAANVAQKFQKQLFFEL

SEQ ID NO: 242 - protein, 767 aa, synthetic construct
  REGION 1..767: note = Cas12g1 polypeptide sequence
MAQASSTPAVSPRPRPRYREERTLVRKLLPRPGQSKQEFRENVKKLRKAFLQFNADVSGVCQWAIQFRPRYGKPAEPTETFWKFFLEPETSLPPNDSRSPEFRRLQAFEAAAGINGAAALDDPAFTNELRDSILAVASRPKTKEAQRLFSRLKDYQPAHRMILAKVAAEWIESRYRRAHQNWERNYEEWKKEKQEWEQNHPELTPEIREAFNQIFQQLEVKEKRVRICPAARLLQNKDNCQYAGKNKHSVLCNQFNEFKKNHLQGKAIKFFYKDAEKYLRCGLQSLKPNVQGPFREDWNKYLRYMNLKEETLRGKNGGRLPHCKNLGQECEFNPHTALCKQYQQQLSSRPDLVQHDELYRKWRREYWREPRKPVFRYPSVKRHSIAKIFGENYFQADFKNSVVGLRLDSMPAGQYLEFAFAPWPRNYRPQPGETEISSVHLHFVGTRPRIGFRFRVPHKRSRFDCTQEELDELRSRTFPRKAQDQKFLEAARKRLLETFPGNAEQELRLLAVDLGTDSARAAFFIGKTFQQAFPLKIVKIEKLYEQWPNQKQAGDRRDASSKQPRPGLSRDHVGRHLQKMRAQASEIAQKRQELTGTPAPETTTDQAAKKATLQPFDLRGLTVHTARMIRDWARLNARQIIQLAEENQVDLIVLESLRGFRPPGYENLDQEKKRRVAFFAHGRIRRKVTEKAVERGMRVVTVPYLASSKVCAECRKKQKDNKQWEKNKKRGLFKCEGCGSQAQVDENAARVLGRVFWGEIELPTAIP

SEQ ID NO: 243 - protein, 870 aa, synthetic construct
  REGION 1..870: note = Cas12h1 polypeptide sequence
MKVHEIPRSQLLKIKQYEGSFVEWYRDLQEDRKKFASLLFRWAAFGYAAREDDGATYISPSQALLERRLLLGDAEDVAIKFLDVLFKGGAPSSSCYSLFYEDFALRDKAKYSGAKREFIEGLATMPLDKIIERIRQDEQLSKIPAEEWLILGAEYSPEEIWEQVAPRIVNVDRSLGKQLRERLGIKCRRPHDAGYCKILMEVVARQLRSHNETYHEYLNQTHEMKTKVANNLTNEFDLVCEFAEVLEEKNYGLGWYVLWQGVKQALKEQKKPTKIQIAVDQLRQPKFAGLLTAKWRALKGAYDTWKLKKRLEKRKAFPYMPNWDNDYQIPVGLTGLGVFTLEVKRTEVVVDLKEHGKLFCSHSHYFGDLTAEKHPSRYHLKFRHKLKLRKRDSRVEPTIGPWIEAALREITIQKKPNGVFYLGLPYALSHGIDNFQIAKRFFSAAKPDKEVINGLPSEMVVGAADLNLSNIVAPVKARIGKGLEGPLHALDYGYGELIDGPKILTPDGPRCGELISLKRDIVEIKSAIKEFKACQREGLTMSEETTTWLSEVESPSDSPRCMIQSRIADTSRRLNSFKYQMNKEGYQDLAEALRLLDAMDSYNSLLESYQRMHLSPGEQSPKEAKFDTKRASFRDLLRRRVAHTIVEYFDDCDIVFFEDLDGPSDSDSRNNALVKLLSPRTLLLYIRQALEKRGIGMVEVAKDGTSQNNPISGHVGWRNKQNKSEIYFYEDKELLVMDADEVGAMNILCRGLNHSVCPYSFVTKAPEKKNDEKKEGDYGKRVKRFLKDRYGSSNVRFLVASMGFVTVTTKRPKDALVGKRLYYHGGELVTHDLHNRMKDEIKYLVEKEVLARRVSLSDSTIKSYKSFAHV

SEQ ID NO: 244 - protein, 1093 aa, synthetic construct
  REGION 1..1093: note = Cas12i1 polypeptide sequence
MSNKEKNASETRKAYTTKMIPRSHDRMKLLGNFMDYLMDGTPIFFELWNQFGGGIDRDIISGTANKDKISDDLLLAVNWFKVMPINSKPQGVSPSNLANLFQQYSGSEPDIQAQEYFASNFDTEKHQWKDMRVEYERLLAELQLSRSDMHHDLKLMYKEKCIGLSLSTAHYITSVMFGTGAKNNRQTKHQFYSKVIQLLEESTQINSVEQLASIILKAGDCDSYRKLRIRCSRKGATPSILKIVQDYELGTNHDDEVNVPSLIANLKEKLGRFEYECEWKCMEKIKAFLASKVGPYYLGSYSAMLENALSPIKGMTTKNCKFVLKQIDAKNDIKYENEPFGKIVEGFFDSPYFESDTNVKWVLHPHHIGESNIKTLWEDLNAIHSKYEEDIASLSEDKKEKRIKVYQGDVCQTINTYCEEVGKEAKTPLVQLLRYLYSRKDDIAVDKIIDGITFLSKKHKVEKQKINPVIQKYPSFNFGNNSKLLGKIISPKDKLKHNLKCNRNQVDNYIWIEIKVLNTKTMRWEKHHYALSSTRFLEEVYYPATSENPPDALAARFRTKTNGYEGKPALSAEQIEQIRSAPVGLRKVKKRQMRLEAARQQNLLPRYTWGKDFNINICKRGNNFEVTLATKVKKKKEKNYKVVLGYDANIVRKNTYAAIEAHANGDGVIDYNDLPVKPIESGFVTVESQVRDKSYDQLSYNGVKLLYCKPHVESRRSFLEKYRNGTMKDNRGNNIQIDFMKDFEAIADDETSLYYFNMKYCKLLQSSIRNHSSQAKEYREEIFELLRDGKLSVLKLSSLSNLSFVMFKVAKSLIGTYFGHLLKKPKNSKSDVKAPPITDEDKQKADPEMFALRLALEEKRLNKVKSKKEVIANKIVAKALELRDKYGPVLIKGENISDTTKKGKKSSTNSFLMDWLARGVANKVKEMVMMHQGLEFVEVNPNFTSHQDPFVHKNPENTFRARYSRCTPSELTEKNRKEILSFLSDKPSKRPTNAYYNEGAMAFLATYGLKKNDVLGVSLEKFKQIMANILHQRSEDQLLFPSRGGMFYLATYKLDADATSVNWNGKQFWVCNADLVAAYNVGLVDIQKDFKKK

SEQ ID NO: 245 - protein, 1054 aa, synthetic construct
  REGION 1..1054: note = Cas12i2 polypeptide sequence
MSSAIKSYKSVLRPNERKNQLLKSTIQCLEDGSAFFFKMLQGLFGGITPEIVRFSTEQEKQQQDIALWCAVNWFRPVSQDSLTHTIASDNLVEKFEEYYGGTASDAIKQYFSASIGESYYWNDCRQQYYDLCRELGVEVSDLTHDLEILCREKCLAVATESNQNNSIISVLFGTGEKEDRSVKLRITKKILEAISNLKEIPKNVAPIQEIILNVAKATKETFRQVYAGNLGAPSTLEKFIAKDGQKEFDLKKLQTDLKKVIRGKSKERDWCCQEELRSYVEQNTIQYDLWAWGEMFNKAHTALKIKSTRNYNFAKQRLEQFKEIQSLNNLLVVKKLNDFFDSEFFSGEETYTICVHHLGGKDLSKLYKAWEDDPADPENAIVVLCDDLKNNFKKEPIRNILRYIFTIRQECSAQDILAAAKYNQQLDRYKSQKANPSVLGNQGFTWTNAVILPEKAQRNDRPNSLDLRIWLYLKLRHPDGRWKKHHIPFYDTRFFQEIYAAGNSPVDTCQFRTPRFGYHLPKLTDQTAIRVNKKHVKAAKTEARIRLAIQQGTLPVSNLKITEISATINSKGQVRIPVKFDVGRQKGTLQIGDRFCGYDQNQTASHAYSLWEVVKEGQYHKELGCFVRFISSGDIVSITENRGNQFDQLSYEGLAYPQYADWRKKASKFVSLWQITKKNKKKEIVTVEAKEKFDAICKYQPRLYKFNKEYAYLLRDIVRGKSLVELQQIRQEIFRFIEQDCGVTRLGSLSLSTLETVKAVKGIIYSYFSTALNASKNNPISDEQRKEFDPELFALLEKLELIRTRKKKQKVERIANSLIQTCLENNIKFIRGEGDLSTTNNATKKKANSRSMDWLARGVFNKIRQLAPMHNITLFGCGSLYTSHQDPLVHRNPDKAMKCRWAAIPVKDIGDWVLRKLSQNLRAKNIGTGEYYHQGVKEFLSHYELQDLEEELLKWRSDRKSNIPCWVLQNRLAEKLGNKEAVVYIPVRGGRIYFATHKVATGAVSIVFDQKQVWVCNADHVAAANIALTVKGIGEQSSDEENPDGSRIKLQLTS

SEQ ID NO: 246 - protein, 4 aa, synthetic construct
  REGION 1..4: note = synthetic peptide sequence
GGGS

SEQ ID NO: 247 - protein, 5 aa, synthetic construct
  REGION 1..5: note = synthetic peptide sequence
GGGGS

SEQ ID NO: 248 - protein, 5 aa, synthetic construct
  REGION 1..5: note = synthetic peptide sequence
EAAAK

SEQ ID NO: 249 - protein, 16 aa, synthetic construct
  REGION 1..16: note = synthetic peptide sequence
SGSETPGTSESATPES

SEQ ID NO: 250 - protein, 6 aa, synthetic construct
  REGION 1..6: note = linker peptide sequence
GGSGGS

SEQ ID NO: 251 - protein, 20 aa, synthetic construct
  REGION 1..20: note = synthetic peptide sequence
GSSGSETPGTSESATPESSG

SEQ ID NO: 252 - DNA, 18 bp, synthetic construct
  misc_feature 1..18: note = synthetic oligonucleotide sequence
  source 1..18: mol_type = other DNA
ggaggctctggaggaagc

SEQ ID NO: 253 - DNA, 60 bp, synthetic construct
  misc_feature 1..60: note = synthetic oligonucleotide sequence
  source 1..60: mol_type = other DNA
ggctcttctggatctgaaacacctggcacaagcgagagcgccacccctgagagctctggc

SEQ ID NO: 254 - protein, 1129 aa, Alicyclobacillus acidiphilus
  REGION 1..1129: note = MISC_FEATURE - AacCas12b polypeptide sequence
MAVKSMKVKLRLDNMPEIRAGLWKLHTEVNAGVRYYTEWLSLLRQENLYRRSPNGDGEQECYKTAEECKAELLERLRARQVENGHCGPAGSDDELLQLARQLYELLVPQAIGAKGDAQQIARKFLSPLADKDAVGGLGIAKAGNKPRWVRMREAGEPGWEEEKAKAEARKSTDRTADVLRALADFGLKPLMRVYTDSDMSSVQWKPLRKGQAVRTWDRDMFQQAIERMMSWESWNQRVGEAYAKLVEQKSRFEQKNFVGQEHLVQLVNQLQQDMKEASHGLESKEQTAHYLTGRALRGSDKVFEKWEKLDPDAPFDLYDTEIKNVQRRNTRRFGSHDLFAKLAEPKYQALWREDASFLTRYAVYNSIVRKLNHAKMFATFTLPDATAHPIWTRFDKLGGNLHQYTFLFNEFGEGRHAIRFQKLLTVEDGVAKEVDDVTVPISMSAQLDDLLPRDPHELVALYFQDYGAEQHLAGEFGGAKIQYRRDQLNHLHARRGARDVYLNLSVRVQSQSEARGERRPPYAAVFRLVGDNHRAFVHFDKLSDYLAEHPDDGKLGSEGLLSGLRVMSVDLGLRTSASISVFRVARKDELKPNSEGRVPFCFPIEGNENLVAVHERSQLLKLPGETESKDLRAIREERQRTLRQLRTQLAYLRLLVRCGSEDVGRRERSWAKLIEQPMDANQMTPDWREAFEDELQKLKSLYGICGDREWTEAVYESVRRVWRHMGKQVRDWRKDVRSGERPKIRGYQKDVVGGNSIEQIEYLERQYKFLKSWSFFGKVSGQVIRAEKGSRFAITLREHIDHAKEDRLKKLADRIIMEALGYVYALDDERGKGKWVAKYPPCQLILLEELSEYQFNNDRPPSENNQLMQWSHRGVFQELLNQAQVHDLLVGTMYAAFSSRFDARTGAPGIRCRRVPARCAREQNPEPFPWWLNKFVAEHKLDGCPLRADDLIPTGEGEFFVSPFSAEEGDFHQIHADLNAAQNLQRRLWSDFDISQIRLRCDWGEVDGEPVLIPRTTGKRTADSYGNKVFYTKTGVTYYERERGKKRRKVFAQEELSEEEAELLVEADEAREKSVVLMRDPSGIINRGDWTRQKEFWSMVNQRIEGYLVKQIRSRVRLQESACENTGDI

SEQ ID NO: 255 - protein, 1140 aa, Bacillus hisashii
  REGION 1..1140: note = MISC_FEATURE - BhCas12b polypeptide sequence
MAPKKKRKVGIHGVPAAATRSFILKIEPNEEVKKGLWKTHEVLNHGIAYYMNILKLIRQEAIYEHHEQDPKNPKKVSKAEIQAELWDFVLKMQKCNSFTHEVDKDEVFNILRELYEELVPSSVEKKGEANQLSNKFLYPLVDPNSQSGKGTASSGRKPRWYNLKIAGDPSWEEEKKKWEEDKKKDPLAKILGKLAEYGLIPLFIPYTDSNEPIVKEIKWMEKSRNQSVRRLDKDMFIQALERFLSWESWNLKVKEEYEKVEKEYKTLEERIKEDIQALKALEQYEKERQEQLLRDTLNTNEYRLSKRGLRGWREIIQKWLKMDENEPSEKYLEVFKDYQRKHPREAGDYSVYEFLSKKENHFIWRNHPEYPYLYATFCEIDKKKKDAKQQATFTLADPINHPLWVRFEERSGSNLNKYRILTEQLHTEKLKKKLTVQLDRLIYPTESGGWEEKGKVDIVLLPSRQFYNQIFLDIEEKGKHAFTYKDESIKFPLKGTLGGARVQFDRDHLRRYPHKVESGNVGRIYFNMTVNIEPTESPVSKSLKIHRDDFPKVVNFKPKELTEWIKDSKGKKLKSGIESLEIGLRVMSIDLGQRQAAAASIFEVVDQKPDIEGKLFFPIKGTELYAVHRASFNIKLPGETLVKSREVLRKAREDNLKLMNQKLNFLRNVLHFQQFEDITEREKRVTKWISRQENSDVPLVYQDELIQIRELMYKPYKDWVAFLKQLHKRLEVEIGKEVKHWRKSLSDGRKGLYGISLKNIDEIDRTRKFLLRWSLRPTEPGEVRRLEPGQRFAIDQLNHLNALKEDRLKKMANTIIMHALGYCYDVRKKKWQAKNPACQIILFEDLSNYNPYEERSRFENSKLMKWSRREIPRQVALQGEIYGLQVGEVGAQFSSRFHAKTGSPGIRCSVVTKEKLQDNRFFKNLQREGRLTLDKIAVLKEGDLYPDKGGEKFISLSKDRKCVTTHADINAAQNLQKRFWTRTHGFYKVYCKAYQVDGQTVYIPESKDQKQKIIEEFGEGYFILKDGVYEWVNAGKLKIKKGSSKQSSSELVDSDILKDSFDLASELKGEKLMLYRDPSGNVFPSDKWMAAGVFFGKLERILISKLTNQYSISTIEDDSSKQSMKRPAATKKAGQAKKKK

SEQ ID NO: 256 - protein, 1108 aa, Bacillus thermoamylovorans
  REGION 1..1108: note = MISC_FEATURE - BTCas12b polypeptide sequence
MATRSFILKIEPNEEVKKGLWKTHEVLNHGIAYYMNILKLIRQEAIYEHHEQDPKNPKKVSKAEIQAELWDFVLKMQKCNSFTHEVDKDVVFNILRELYEELVPSSVEKKGEANQLSNKFLYPLVDPNSQSGKGTASSGRKPRWYNLKIAGDPSWEEEKKKWEEDKKKDPLAKILGKLAEYGLIPLFIPFTDSNEPIVKEIKWMEKSRNQSVRRLDKDMFIQALERFLSWESWNLKVKEEYEKVEKEHKTLEERIKEDIQAFKSLEQYEKERQEQLLRDTLNTNEYRLSKRGLRGWREIIQKWLKMDENEPSEKYLEVFKDYQRKHPREAGDYSVYEFLSKKENHFIWRNHPEYPYLYATFCEIDKKKKDAKQQATFTLADPINHPLWVRFEERSGSNLNKYRILTEQLHTEKLKKKLTVQLDRLIYPTESGGWEEKGKVDIVLLPSRQFYNQIFLDIEEKGKHAFTYKDESIKFPLKGTLGGARVQFDRDHLRRYPHKVESGNVGRIYFNMTVNIEPTESPVSKSLKIHRDDFPKFVNFKPKELTEWIKDSKGKKLKSGIESLEIGLRVMSIDLGQRQAAAASIFEVVDQKPDIEGKLFFPIKGTELYAVHRASFNIKLPGETLVKSREVLRKAREDNLKLMNQKLNFLRNVLHFQQFEDITEREKRVTKWISRQENSDVPLVYQDELIQIRELMYKPYKDWVAFLKQLHKRLEVEIGKEVKHWRKSLSDGRKGLYGISLKNIDEIDRTRKFLLRWSLRPTEPGEVRRLEPGQRFAIDQLNHLNALKEDRLKKMANTIIMHALGYCYDVRKKKWQAKNPACQIILFEDLSNYNPYEERSRFENSKLMKWSRREIPRQVALQGEIYGLQVGEVGAQFSSRFHAKTGSPGIRCSVVTKEKLQDNRFFKNLQREGRLTLDKIAVLKEGDLYPDKGGEKFISLSKDRKLVTTHADINAAQNLQKRFWTRTHGFYKVYCKAYQVDGQTVYIPESKDQKQKIIEEFGEGYFILKDGVYEWGNAGKLKIKKGSSKQSSSELVDSDILKDSFDLASELKGEKLMLYRDPSGNVFPSDKWMAAGVFFGKLERILISKLTNQYSISTIEDDSSKQSM

SEQ ID NO: 257 - protein, 1112 aa, Bacillus sp.
  REGION 1..1112: note = MISC_FEATURE - BvCas12b (Bacillus sp. V3-13) polypeptide sequence
MAIRSIKLKMKTNSGTDSIYLRKALWRTHQLINEGIAYYMNLLTLYRQEAIGDKTKEAYQAELINIIRNQQRNNGSSEEHGSDQEILALLRQLYELIIPSSIGESGDANQLGNKFLYPLVDPNSQSGKGTSNAGRKPRWKRLKEEGNPDWELEKKKDEERKAKDPTVKIFDNLNKYGLLPLFPLFTNIQKDIEWLPLGKRQSVRKWDKDMFIQAIERLLSWESWNRRVADEYKQLKEKTESYYKEHLTGGEEWIEKIRKFEKERNMELEKNAFAPNDGYFITSRQIRGWDRVYEKWSKLPESASPEELWKVVAEQQNKMSEGFGDPKVFSFLANRENRDIWRGHSERIYHIAAYNGLQKKLSRTKEQATFTLPDAIEHPLWIRYESPGGTNLNLFKLEEKQKKNYYVTLSKIIWPSEEKWIEKENIEIPLAPSIQFNRQIKLKQHVKGKQEISFSDYSSRISLDGVLGGSRIQFNRKYIKNHKELLGEGDIGPVFFNLVVDVAPLQETRNGRLQSPIGKALKVISSDFSKVIDYKPKELMDWMNTGSASNSFGVASLLEGMRVMSIDMGQRTSASVSIFEVVKELPKDQEQKLFYSINDTELFAIHKRSFLLNLPGEVVTKNNKQQRQERRKKRQFVRSQIRMLANVLRLETKKTPDERKKAIHKLMEIVQSYDSWTASQKEVWEKELNLLTNMAAFNDEIWKESLVELHHRIEPYVGQIVSKWRKGLSEGRKNLAGISMWNIDELEDTRRLLISWSKRSRTPGEANRIETDEPFGSSLLQHIQNVKDDRLKQMANLIIMTALGFKYDKEEKDRYKRWKETYPACQIILFENLNRYLFNLDRSRRENSRLMKWAHRSIPRTVSMQGEMFGLQVGDVRSEYSSRFHAKTGAPGIRCHALTEEDLKAGSNTLKRLIEDGFINESELAYLKKGDIIPSQGGELFVTLSKRYKKDSDNNELTVIHADINAAQNLQKRFWQQNSEVYRVPCQLARMGEDKLYIPKSQTETIKKYFGKGSFVKNNTEQEVYKWEKSEKMKIKTDTTFDLQDLDGFEDISKTIELAQEQQKKYLTMFRDPSGYFFNNETWRPQKEYWSIVNNIIKSCLKKKILSNKVEL

SEQ ID NO: 258 - DNA, 47 bp, synthetic construct
  misc_feature 1..47: note = 5'UTR oligonucleotide sequence
  source 1..47: mol_type = other DNA
gggaaataagagagaaaagaagagtaagaagaaatataagagccacc

SEQ ID NO: 259 - DNA, 101 bp, synthetic construct
  misc_feature 1..101: note = 3'UTR (TriLink standard UTR)polynucleotide sequence
  source 1..101: mol_type = other DNA
gctggagcctcggtggccatgcttcttgccccttgggcctccccccagcccctcctccccttcctgcacccgtacccccgtggtctttgaataaagtctga

SEQ ID NO: 260 - DNA, 3420 bp, Bacillus hisashii
  misc_feature 1..3420: note = bhCas12b (V4) polynucleotide sequence
  source 1..3420: mol_type = genomic DNA
atggccccaaagaagaagcggaaggtcggtatccacggagtcccagcagccgccaccagatccttcatcctgaagatcgagcccaacgaggaagtgaagaaaggcctctggaaaacccacgaggtgctgaaccacggaatcgcctactacatgaatatcctgaagctgatccggcaagaggccatctacgagcaccacgagcaggaccccaagaatcccaagaaggtgtccaaggccgagatccaggccgagctgtgggatttcgtgctgaagatgcagaagtgcaacagcttcacacacgaggtggacaaggacgaggtgttcaacatcctgagagagctgtacgaggaactggtgcccagcagcgtggaaaagaagggcgaagccaaccagctgagcaacaagtttctgtaccctctggtggaccccaacagccagtctggaaagggaacagccagcagcggcagaaagcccagatggtacaacctgaagattgccggcgatccctcctgggaagaagagaagaagaagtgggaagaagataagaaaaaggacccgctggccaagatcctgggcaagctggctgagtacggactgatccctctgttcatcccctacaccgacagcaacgagcccatcgtgaaagaaatcaagtggatggaaaagtcccggaaccagagcgtgcggcggctggataaggacatgttcattcaggccctggaacggttcctgagctgggagagctggaacctgaaagtgaaagaggaatacgagaaggtcgagaaagagtacaagaccctggaagagaggatcaaagaggacatccaggctctgaaggctctggaacagtatgagaaagagcggcaagaacagctgctgcgggacaccctgaacaccaacgagtaccggctgagcaagagaggccttagaggctggcgggaaatcatccagaaatggctgaaaatggacgagaacgagccctccgagaagtacctggaagtgttcaaggactaccagcggaagcaccctagagaggccggcgattacagcgtgtacgagttcctgtccaagaaagagaaccacttcatctggcggaatcaccctgagtacccctacctgtacgccaccttctgcgagatcgacaagaaaaagaaggacgccaagcagcaggccaccttcacactggccgatcctatcaatcaccctctgtgggtccgattcgaggaaagaagcggcagcaacctgaacaagtacagaatcctgaccgagcagctgcacaccgagaagctgaagaaaaagctgacagtgcagctggaccggctgatctaccctacagaatctggcggctgggaagagaagggcaaagtggacattgtgctgctgcccagccggcagttctacaaccagatcttcctggacatcgaggaaaagggcaagcacgccttcacctacaaggatgagagcatcaagttccctctgaagggcacactcggcggagccagagtgcagttcgacagagatcacctgagaagataccctcacaaggtggaaagcggcaacgtgggcagaatctacttcaacatgaccgtgaacatcgagcctacagagtccccagtgtccaagtctctgaagatccaccgggacgacttccccaaggtggtcaacttcaagcccaaagaactgaccgagtggatcaaggacagcaagggcaagaaactgaagtccggcatcgagtccctggaaatcggcctgagagtgatgagcatcgacctgggacagagacaggccgctgccgcctctattttcgaggtggtggatcagaagcccgacatcgaaggcaagctgtttttcccaatcaagggcaccgagctgtatgccgtgcacagagccagcttcaacatcaagctgcccggcgagacactggtcaagagcagagaagtgctgcggaaggccagagaggacaatctgaaactgatgaaccagaagctcaacttcctgcggaacgtgctgcacttccagcagttcgaggacatcaccgagagagagaagcgggtcaccaagtggatcagcagacaagagaacagcgacgtgcccctggtgtaccaggatgagctgatccagatccgcgagctgatgtacaagccttacaaggactgggtcgccttcctgaagcagctccacaagagactggaagtcgagatcggcaaagaagtgaagcactggcggaagtccctgagcgacggaagaaagggcctgtacggcatctccctgaagaacatcgacgagatcgatcggacccggaagttcctgctgagatggtccctgaggcctaccgaacctggcgaagtgcgtagactggaacccggccagagattcgccatcgaccagctgaatcacctgaacgccctgaaagaagatcggctgaagaagatggccaacaccatcatcatgcacgccctgggctactgctacgacgtgcggaagaagaaatggcaggctaagaaccccgcctgccagatcatcctgttcgaggatctgagcaactacaacccctacgaggaaaggtcccgcttcgagaacagcaagctcatgaagtggtccagacgcgagatccccagacaggttgcactgcagggcgagatctatggcctgcaagtgggagaagtgggcgctcagttcagcagcagattccacgccaagacaggcagccctggcatcagatgtagcgtcgtgaccaaagagaagctgcaggacaatcggttcttcaagaatctgcagagagagggcagactgaccctggacaaaatcgccgtgctgaaagagggcgatctgtacccagacaaaggcggcgagaagttcatcagcctgagcaaggatcggaagtgcgtgaccacacacgccgacatcaacgccgctcagaacctgcagaagcggttctggacaagaacccacggcttctacaaggtgtactgcaaggcctaccaggtggacggccagaccgtgtacatccctgagagcaaggaccagaagcagaagatcatcgaagagttcggcgagggctacttcattctgaaggacggggtgtacgaatgggtcaacgccggcaagctgaaaatcaagaagggcagctccaagcagagcagcagcgagctggtggatagcgacatcctgaaagacagcttcgacctggcctccgagctgaaaggcgaaaagctgatgctgtacagggaccccagcggcaatgtgttccccagcgacaaatggatggccgctggcgtgttcttcggaaagctggaacgcatcctgatcagcaagctgaccaaccagtactccatcagcaccatcgaggacgacagcagcaagcagtctatgaaaaggccggcggccacgaaaaaggccggccaggcaaaaaagaaaaag

SEQ ID NO: 261 - protein, 17 aa, synthetic construct
  REGION 1..17: note = synthetic peptide sequence
MAPKKKRKVGIHGVPAA

SEQ ID NO: 262 - DNA, 51 bp, synthetic construct
  misc_feature 1..51: note = synthetic oligonucleotide sequence
  source 1..51: mol_type = other DNA
atggccccaaagaagaagcggaaggtcggtatccacggagtcccagcagcc

SEQ ID NO: 263 - protein, 1554 aa, synthetic construct
  REGION 1..1554: note = 101 Cas9 TadAins 1015 polypeptide sequence
MDKKYSIGLAIGTNSVGWAVITDEYKVPSKKFKVLGNTDRHSIKKNLIGALLFDSGETAEATRLKRTARRRYTRRKNRICYLQEIFSNEMAKVDDSFFHRLEESFLVEEDKKHERHPIFGNIVDEVAYHEKYPTIYHLRKKLVDSTDKADLRLIYLALAHMIKFRGHFLIEGDLNPDNSDVDKLFIQLVQTYNQLFEENPINASGVDAKAILSARLSKSRRLENLIAQLPGEKKNGLFGNLIALSLGLTPNFKSNFDLAEDAKLQLSKDTYDDDLDNLLAQIGDQYADLFLAAKNLSDAILLSDILRVNTEITKAPLSASMIKRYDEHHQDLTLLKALVRQQLPEKYKEIFFDQSKNGYAGYIDGGASQEEFYKFIKPILEKMDGTEELLVKLNREDLLRKQRTFDNGSIPHQIHLGELHAILRRQEDFYPFLKDNREKIEKILTFRIPYYVGPLARGNSRFAWMTRKSEETITPWNFEEVVDKGASAQSFIERMTNFDKNLPNEKVLPKHSLLYEYFTVYNELTKVKYVTEGMRKPAFLSGEQKKAIVDLLFKTNRKVTVKQLKEDYFKKIECFDSVEISGVEDRFNASLGTYHDLLKIIKDKDFLDNEENEDILEDIVLTLTLFEDREMIEERLKTYAHLFDDKVMKQLKRRRYTGWGRLSRKLINGIRDKQSGKTILDFLKSDGFANRNFMQLIHDDSLTFKEDIQKAQVSGQGDSLHEHIANLAGSPAIKKGILQTVKVVDELVKVMGRHKPENIVIEMARENQTTQKGQKNSRERMKRIEEGIKELGSQILKEHPVENTQLQNEKLYLYYLQNGRDMYVDQELDINRLSDYDVDHIVPQSFLKDDSIDNKVLTRSDKNRGKSDNVPSEEVVKKMKNYWRQLLNAKLITQRKFDNLTKAERGGLSELDKAGFIKRQLVETRQITKHVAQILDSRMNTKYDENDKLIREVKVITLKSKLVSDFRKDFQFYKVREINNYHHAHDAYLNAVVGTALIKKYPKLESEFVYGDYKVGSSGSETPGTSESATPESSGSEVEFSHEYWMRHALTLAKRARDEREVPVGAVLVLNNRVIGEGWNRAIGLHDPTAHAEIMALRQGGLVMQNYRLIDATLYVTFEPCVMCAGAMIHSRIGRVVFGVRNAKTGAAGSLMDVLHYPGMNHRVEITEGILADECAALLCYFFRMPRQVFNAQKKAQSSTDYDVRKMIAKSEQEIGKATAKYFFYSNIMNFFKTEITLANGEIRKRPLIETNGETGEIVWDKGRDFATVRKVLSMPQVNIVKKTEVQTGGFSKESILPKRNSDKLIARKKDWDPKKYGGFDSPTVAYSVLVVAKVEKGKSKKLKSVKELLGITIMERSSFEKNPIDFLEAKGYKEVKKDLIIKLPKYSLFELENGRKRMLASAGELQKGNELALPSKYVNFLYLASHYEKLKGSPEDNEQKQLFVEQHKHYLDEIIEQISEFSKRVILADANLDKVLSAYNKHRDKPIREQAENIIHLFTLTNLGAPAAFKYFDTTIDRKRYTSTKEVLDATLIHQSITGLYETRIDLSQLGGD

SEQ ID NO: 264 - protein, 1554 aa, synthetic construct
  REGION 1..1554: note = 102 Cas9 TadAins 1022 polypeptide sequence
MDKKYSIGLAIGTNSVGWAVITDEYKVPSKKFKVLGNTDRHSIKKNLIGALLFDSGETAEATRLKRTARRRYTRRKNRICYLQEIFSNEMAKVDDSFFHRLEESFLVEEDKKHERHPIFGNIVDEVAYHEKYPTIYHLRKKLVDSTDKADLRLIYLALAHMIKFRGHFLIEGDLNPDNSDVDKLFIQLVQTYNQLFEENPINASGVDAKAILSARLSKSRRLENLIAQLPGEKKNGLFGNLIALSLGLTPNFKSNFDLAEDAKLQLSKDTYDDDLDNLLAQIGDQYADLFLAAKNLSDAILLSDILRVNTEITKAPLSASMIKRYDEHHQDLTLLKALVRQQLPEKYKEIFFDQSKNGYAGYIDGGASQEEFYKFIKPILEKMDGTEELLVKLNREDLLRKQRTFDNGSIPHQIHLGELHAILRRQEDFYPFLKDNREKIEKILTFRIPYYVGPLARGNSRFAWMTRKSEETITPWNFEEVVDKGASAQSFIERMTNFDKNLPNEKVLPKHSLLYEYFTVYNELTKVKYVTEGMRKPAFLSGEQKKAIVDLLFKTNRKVTVKQLKEDYFKKIECFDSVEISGVEDRFNASLGTYHDLLKIIKDKDFLDNEENEDILEDIVLTLTLFEDREMIEERLKTYAHLFDDKVMKQLKRRRYTGWGRLSRKLINGIRDKQSGKTILDFLKSDGFANRNFMQLIHDDSLTFKEDIQKAQVSGQGDSLHEHIANLAGSPAIKKGILQTVKVVDELVKVMGRHKPENIVIEMARENQTTQKGQKNSRERMKRIEEGIKELGSQILKEHPVENTQLQNEKLYLYYLQNGRDMYVDQELDINRLSDYDVDHIVPQSFLKDDSIDNKVLTRSDKNRGKSDNVPSEEVVKKMKNYWRQLLNAKLITQRKFDNLTKAERGGLSELDKAGFIKRQLVETRQITKHVAQILDSRMNTKYDENDKLIREVKVITLKSKLVSDFRKDFQFYKVREINNYHHAHDAYLNAVVGTALIKKYPKLESEFVYGDYKVYDVRKMIGSSGSETPGTSESATPESSGSEVEFSHEYWMRHALTLAKRARDEREVPVGAVLVLNNRVIGEGWNRAIGLHDPTAHAEIMALRQGGLVMQNYRLIDATLYVTFEPCVMCAGAMIHSRIGRVVFGVRNAKTGAAGSLMDVLHYPGMNHRVEITEGILADECAALLCYFFRMPRQVFNAQKKAQSSTDAKSEQEIGKATAKYFFYSNIMNFFKTEITLANGEIRKRPLIETNGETGEIVWDKGRDFATVRKVLSMPQVNIVKKTEVQTGGFSKESILPKRNSDKLIARKKDWDPKKYGGFDSPTVAYSVLVVAKVEKGKSKKLKSVKELLGITIMERSSFEKNPIDFLEAKGYKEVKKDLIIKLPKYSLFELENGRKRMLASAGELQKGNELALPSKYVNFLYLASHYEKLKGSPEDNEQKQLFVEQHKHYLDEIIEQISEFSKRVILADANLDKVLSAYNKHRDKPIREQAENIIHLFTLTNLGAPAAFKYFDTTIDRKRYTSTKEVLDATLIHQSITGLYETRIDLSQLGGD

SEQ ID NO: 265 - protein, 1554 aa, synthetic construct
  REGION 1..1554: note = 103 Cas9 TadAins 1029 polypeptide sequence
MDKKYSIGLAIGTNSVGWAVITDEYKVPSKKFKVLGNTDRHSIKKNLIGALLFDSGETAEATRLKRTARRRYTRRKNRICYLQEIFSNEMAKVDDSFFHRLEESFLVEEDKKHERHPIFGNIVDEVAYHEKYPTIYHLRKKLVDSTDKADLRLIYLALAHMIKFRGHFLIEGDLNPDNSDVDKLFIQLVQTYNQLFEENPINASGVDAKAILSARLSKSRRLENLIAQLPGEKKNGLFGNLIALSLGLTPNFKSNFDLAEDAKLQLSKDTYDDDLDNLLAQIGDQYADLFLAAKNLSDAILLSDILRVNTEITKAPLSASMIKRYDEHHQDLTLLKALVRQQLPEKYKEIFFDQSKNGYAGYIDGGASQEEFYKFIKPILEKMDGTEELLVKLNREDLLRKQRTFDNGSIPHQIHLGELHAILRRQEDFYPFLKDNREKIEKILTFRIPYYVGPLARGNSRFAWMTRKSEETITPWNFEEVVDKGASAQSFIERMTNFDKNLPNEKVLPKHSLLYEYFTVYNELTKVKYVTEGMRKPAFLSGEQKKAIVDLLFKTNRKVTVKQLKEDYFKKIECFDSVEISGVEDRFNASLGTYHDLLKIIKDKDFLDNEENEDILEDIVLTLTLFEDREMIEERLKTYAHLFDDKVMKQLKRRRYTGWGRLSRKLINGIRDKQSGKTILDFLKSDGFANRNFMQLIHDDSLTFKEDIQKAQVSGQGDSLHEHIANLAGSPAIKKGILQTVKVVDELVKVMGRHKPENIVIEMARENQTTQKGQKNSRERMKRIEEGIKELGSQILKEHPVENTQLQNEKLYLYYLQNGRDMYVDQELDINRLSDYDVDHIVPQSFLKDDSIDNKVLTRSDKNRGKSDNVPSEEVVKKMKNYWRQLLNAKLITQRKFDNLTKAERGGLSELDKAGFIKRQLVETRQITKHVAQILDSRMNTKYDENDKLIREVKVITLKSKLVSDFRKDFQFYKVREINNYHHAHDAYLNAVVGTALIKKYPKLESEFVYGDYKVYDVRKMIAKSEQEIGSSGSETPGTSESATPESSGSEVEFSHEYWMRHALTLAKRARDEREVPVGAVLVLNNRVIGEGWNRAIGLHDPTAHAEIMALRQGGLVMQNYRLIDATLYVTFEPCVMCAGAMIHSRIGRVVFGVRNAKTGAAGSLMDVLHYPGMNHRVEITEGILADECAALLCYFFRMPRQVFNAQKKAQSSTDGKATAKYFFYSNIMNFFKTEITLANGEIRKRPLIETNGETGEIVWDKGRDFATVRKVLSMPQVNIVKKTEVQTGGFSKESILPKRNSDKLIARKKDWDPKKYGGFDSPTVAYSVLVVAKVEKGKSKKLKSVKELLGITIMERSSFEKNPIDFLEAKGYKEVKKDLIIKLPKYSLFELENGRKRMLASAGELQKGNELALPSKYVNFLYLASHYEKLKGSPEDNEQKQLFVEQHKHYLDEIIEQISEFSKRVILADANLDKVLSAYNKHRDKPIREQAENIIHLFTLTNLGAPAAFKYFDTTIDRKRYTSTKEVLDATLIHQSITGLYETRIDLSQLGGD

SEQ ID NO: 266 - protein, 1554 aa, synthetic construct
  REGION 1..1554: note = 103 Cas9 TadAins 1040 polypeptide sequence
MDKKYSIGLAIGTNSVGWAVITDEYKVPSKKFKVLGNTDRHSIKKNLIGALLFDSGETAEATRLKRTARRRYTRRKNRICYLQEIFSNEMAKVDDSFFHRLEESFLVEEDKKHERHPIFGNIVDEVAYHEKYPTIYHLRKKLVDSTDKADLRLIYLALAHMIKFRGHFLIEGDLNPDNSDVDKLFIQLVQTYNQLFEENPINASGVDAKAILSARLSKSRRLENLIAQLPGEKKNGLFGNLIALSLGLTPNFKSNFDLAEDAKLQLSKDTYDDDLDNLLAQIGDQYADLFLAAKNLSDAILLSDILRVNTEITKAPLSASMIKRYDEHHQDLTLLKALVRQQLPEKYKEIFFDQSKNGYAGYIDGGASQEEFYKFIKPILEKMDGTEELLVKLNREDLLRKQRTFDNGSIPHQIHLGELHAILRRQEDFYPFLKDNREKIEKILTFRIPYYVGPLARGNSRFAWMTRKSEETITPWNFEEVVDKGASAQSFIERMTNFDKNLPNEKVLPKHSLLYEYFTVYNELTKVKYVTEGMRKPAFLSGEQKKAIVDLLFKTNRKVTVKQLKEDYFKKIECFDSVEISGVEDRFNASLGTYHDLLKIIKDKDFLDNEENEDILEDIVLTLTLFEDREMIEERLKTYAHLFDDKVMKQLKRRRYTGWGRLSRKLINGIRDKQSGKTILDFLKSDGFANRNFMQLIHDDSLTFKEDIQKAQVSGQGDSLHEHIANLAGSPAIKKGILQTVKVVDELVKVMGRHKPENIVIEMARENQTTQKGQKNSRERMKRIEEGIKELGSQILKEHPVENTQLQNEKLYLYYLQNGRDMYVDQELDINRLSDYDVDHIVPQSFLKDDSIDNKVLTRSDKNRGKSDNVPSEEVVKKMKNYWRQLLNAKLITQRKFDNLTKAERGGLSELDKAGFIKRQLVETRQITKHVAQILDSRMNTKYDENDKLIREVKVITLKSKLVSDFRKDFQFYKVREINNYHHAHDAYLNAVVGTALIKKYPKLESEFVYGDYKVYDVRKMIAKSEQEIGKATAKYFFYSGSSGSETPGTSESATPESSGSEVEFSHEYWMRHALTLAKRARDEREVPVGAVLVLNNRVIGEGWNRAIGLHDPTAHAEIMALRQGGLVMQNYRLIDATLYVTFEPCVMCAGAMIHSRIGRVVFGVRNAKTGAAGSLMDVLHYPGMNHRVEITEGILADECAALLCYFFRMPRQVFNAQKKAQSSTDNIMNFFKTEITLANGEIRKRPLIETNGETGEIVWDKGRDFATVRKVLSMPQVNIVKKTEVQTGGFSKESILPKRNSDKLIARKKDWDPKKYGGFDSPTVAYSVLVVAKVEKGKSKKLKSVKELLGITIMERSSFEKNPIDFLEAKGYKEVKKDLIIKLPKYSLFELENGRKRMLASAGELQKGNELALPSKYVNFLYLASHYEKLKGSPEDNEQKQLFVEQHKHYLDEIIEQISEFSKRVILADANLDKVLSAYNKHRDKPIREQAENIIHLFTLTNLGAPAAFKYFDTTIDRKRYTSTKEVLDATLIHQSITGLYETRIDLSQLGGD

SEQ ID NO: 267 - protein, 1554 aa, synthetic construct
  REGION 1..1554: note = 105 Cas9 TadAins 1068 polypeptide sequence
MDKKYSIGLAIGTNSVGWAVITDEYKVPSKKFKVLGNTDRHSIKKNLIGALLFDSGETAEATRLKRTARRRYTRRKNRICYLQEIFSNEMAKVDDSFFHRLEESFLVEEDKKHERHPIFGNIVDEVAYHEKYPTIYHLRKKLVDSTDKADLRLIYLALAHMIKFRGHFLIEGDLNPDNSDVDKLFIQLVQTYNQLFEENPINASGVDAKAILSARLSKSRRLENLIAQLPGEKKNGLFGNLIALSLGLTPNFKSNFDLAEDAKLQLSKDTYDDDLDNLLAQIGDQYADLFLAAKNLSDAILLSDILRVNTEITKAPLSASMIKRYDEHHQDLTLLKALVRQQLPEKYKEIFFDQSKNGYAGYIDGGASQEEFYKFIKPILEKMDGTEELLVKLNREDLLRKQRTFDNGSIPHQIHLGELHAILRRQEDFYPFLKDNREKIEKILTFRIPYYVGPLARGNSRFAWMTRKSEETITPWNFEEVVDKGASAQSFIERMTNFDKNLPNEKVLPKHSLLYEYFTVYNELTKVKYVTEGMRKPAFLSGEQKKAIVDLLFKTNRKVTVKQLKEDYFKKIECFDSVEISGVEDRFNASLGTYHDLLKIIKDKDFLDNEENEDILEDIVLTLTLFEDREMIEERLKTYAHLFDDKVMKQLKRRRYTGWGRLSRKLINGIRDKQSGKTILDFLKSDGFANRNFMQLIHDDSLTFKEDIQKAQVSGQGDSLHEHIANLAGSPAIKKGILQTVKVVDELVKVMGRHKPENIVIEMARENQTTQKGQKNSRERMKRIEEGIKELGSQILKEHPVENTQLQNEKLYLYYLQNGRDMYVDQELDINRLSDYDVDHIVPQSFLKDDSIDNKVLTRSDKNRGKSDNVPSEEVVKKMKNYWRQLLNAKLITQRKFDNLTKAERGGLSELDKAGFIKRQLVETRQITKHVAQILDSRMNTKYDENDKLIREVKVITLKSKLVSDFRKDFQFYKVREINNYHHAHDAYLNAVVGTALIKKYPKLESEFVYGDYKVYDVRKMIAKSEQEIGKATAKYFFYSNIMNFFKTEITLANGEIRKRPLIETNGEGSSGSETPGTSESATPESSGSEVEFSHEYWMRHALTLAKRARDEREVPVGAVLVLNNRVIGEGWNRAIGLHDPTAHAEIMALRQGGLVMQNYRLIDATLYVTFEPCVMCAGAMIHSRIGRVVFGVRNAKTGAAGSLMDVLHYPGMNHRVEITEGILADECAALLCYFFRMPRQVFNAQKKAQSSTDTGEIVWDKGRDFATVRKVLSMPQVNIVKKTEVQTGGFSKESILPKRNSDKLIARKKDWDPKKYGGFDSPTVAYSVLVVAKVEKGKSKKLKSVKELLGITIMERSSFEKNPIDFLEAKGYKEVKKDLIIKLPKYSLFELENGRKRMLASAGELQKGNELALPSKYVNFLYLASHYEKLKGSPEDNEQKQLFVEQHKHYLDEIIEQISEFSKRVILADANLDKVLSAYNKHRDKPIREQAENIIHLFTLTNLGAPAAFKYFDTTIDRKRYTSTKEVLDATLIHQSITGLYETRIDLSQLGGD

SEQ ID NO: 268 - protein, 1554 aa, synthetic construct
  REGION 1..1554: note = 106 Cas9 TadAins 1247 polypeptide sequence
MDKKYSIGLAIGTNSVGWAVITDEYKVPSKKFKVLGNTDRHSIKKNLIGALLFDSGETAEATRLKRTARRRYTRRKNRICYLQEIFSNEMAKVDDSFFHRLEESFLVEEDKKHERHPIFGNIVDEVAYHEKYPTIYHLRKKLVDSTDKADLRLIYLALAHMIKFRGHFLIEGDLNPDNSDVDKLFIQLVQTYNQLFEENPINASGVDAKAILSARLSKSRRLENLIAQLPGEKKNGLFGNLIALSLGLTPNFKSNFDLAEDAKLQLSKDTYDDDLDNLLAQIGDQYADLFLAAKNLSDAILLSDILRVNTEITKAPLSASMIKRYDEHHQDLTLLKALVRQQLPEKYKEIFFDQSKNGYAGYIDGGASQEEFYKFIKPILEKMDGTEELLVKLNREDLLRKQRTFDNGSIPHQIHLGELHAILRRQEDFYPFLKDNREKIEKILTFRIPYYVGPLARGNSRFAWMTRKSEETITPWNFEEVVDKGASAQSFIERMTNFDKNLPNEKVLPKHSLLYEYFTVYNELTKVKYVTEGMRKPAFLSGEQKKAIVDLLFKTNRKVTVKQLKEDYFKKIECFDSVEISGVEDRFNASLGTYHDLLKIIKDKDFLDNEENEDILEDIVLTLTLFEDREMIEERLKTYAHLFDDKVMKQLKRRRYTGWGRLSRKLINGIRDKQSGKTILDFLKSDGFANRNFMQLIHDDSLTFKEDIQKAQVSGQGDSLHEHIANLAGSPAIKKGILQTVKVVDELVKVMGRHKPENIVIEMARENQTTQKGQKNSRERMKRIEEGIKELGSQILKEHPVENTQLQNEKLYLYYLQNGRDMYVDQELDINRLSDYDVDHIVPQSFLKDDSIDNKVLTRSDKNRGKSDNVPSEEVVKKMKNYWRQLLNAKLITQRKFDNLTKAERGGLSELDKAGFIKRQLVETRQITKHVAQILDSRMNTKYDENDKLIREVKVITLKSKLVSDFRKDFQFYKVREINNYHHAHDAYLNAVVGTALIKKYPKLESEFVYGDYKVYDVRKMIAKSEQEIGKATAKYFFYSNIMNFFKTEITLANGEIRKRPLIETNGETGEIVWDKGRDFATVRKVLSMPQVNIVKKTEVQTGGFSKESILPKRNSDKLIARKKDWDPKKYGGFDSPTVAYSVLVVAKVEKGKSKKLKSVKELLGITIMERSSFEKNPIDFLEAKGYKEVKKDLIIKLPKYSLFELENGRKRMLASAGELQKGNELALPSKYVNFLYLASHYEKLKGGSSGSETPGTSESATPESSGSEVEFSHEYWMRHALTLAKRARDEREVPVGAVLVLNNRVIGEGWNRAIGLHDPTAHAEIMALRQGGLVMQNYRLIDATLYVTFEPCVMCAGAMIHSRIGRVVFGVRNAKTGAAGSLMDVLHYPGMNHRVEITEGILADECAALLCYFFRMPRQVFNAQKKAQSSTDSPEDNEQKQLFVEQHKHYLDEIIEQISEFSKRVILADANLDKVLSAYNKHRDKPIREQAENIIHLFTLTNLGAPAAFKYFDTTIDRKRYTSTKEVLDATLIHQSITGLYETRIDLSQLGGD

SEQ ID NO: 269 - protein, 1554 aa, synthetic construct
  REGION 1..1554: note = 107 Cas9 TadAins 1054 polypeptide sequence
MDKKYSIGLAIGTNSVGWAVITDEYKVPSKKFKVLGNTDRHSIKKNLIGALLFDSGETAEATRLKRTARRRYTRRKNRICYLQEIFSNEMAKVDDSFFHRLEESFLVEEDKKHERHPIFGNIVDEVAYHEKYPTIYHLRKKLVDSTDKADLRLIYLALAHMIKFRGHFLIEGDLNPDNSDVDKLFIQLVQTYNQLFEENPINASGVDAKAILSARLSKSRRLENLIAQLPGEKKNGLFGNLIALSLGLTPNFKSNFDLAEDAKLQLSKDTYDDDLDNLLAQIGDQYADLFLAAKNLSDAILLSDILRVNTEITKAPLSASMIKRYDEHHQDLTLLKALVRQQLPEKYKEIFFDQSKNGYAGYIDGGASQEEFYKFIKPILEKMDGTEELLVKLNREDLLRKQRTFDNGSIPHQIHLGELHAILRRQEDFYPFLKDNREKIEKILTFRIPYYVGPLARGNSRFAWMTRKSEETITPWNFEEVVDKGASAQSFIERMTNFDKNLPNEKVLPKHSLLYEYFTVYNELTKVKYVTEGMRKPAFLSGEQKKAIVDLLFKTNRKVTVKQLKEDYFKKIECFDSVEISGVEDRFNASLGTYHDLLKIIKDKDFLDNEENEDILEDIVLTLTLFEDREMIEERLKTYAHLFDDKVMKQLKRRRYTGWGRLSRKLINGIRDKQSGKTILDFLKSDGFANRNFMQLIHDDSLTFKEDIQKAQVSGQGDSLHEHIANLAGSPAIKKGILQTVKVVDELVKVMGRHKPENIVIEMARENQTTQKGQKNSRERMKRIEEGIKELGSQILKEHPVENTQLQNEKLYLYYLQNGRDMYVDQELDINRLSDYDVDHIVPQSFLKDDSIDNKVLTRSDKNRGKSDNVPSEEVVKKMKNYWRQLLNAKLITQRKFDNLTKAERGGLSELDKAGFIKRQLVETRQITKHVAQILDSRMNTKYDENDKLIREVKVITLKSKLVSDFRKDFQFYKVREINNYHHAHDAYLNAVVGTALIKKYPKLESEFVYGDYKVYDVRKMIAKSEQEIGKATAKYFFYSNIMNFFKTEITLANGSSGSETPGTSESATPESSGSEVEFSHEYWMRHALTLAKRARDEREVPVGAVLVLNNRVIGEGWNRAIGLHDPTAHAEIMALRQGGLVMQNYRLIDATLYVTFEPCVMCAGAMIHSRIGRVVFGVRNAKTGAAGSLMDVLHYPGMNHRVEITEGILADECAALLCYFFRMPRQVFNAQKKAQSSTDGEIRKRPLIETNGETGEIVWDKGRDFATVRKVLSMPQVNIVKKTEVQTGGFSKESILPKRNSDKLIARKKDWDPKKYGGFDSPTVAYSVLVVAKVEKGKSKKLKSVKELLGITIMERSSFEKNPIDFLEAKGYKEVKKDLIIKLPKYSLFELENGRKRMLASAGELQKGNELALPSKYVNFLYLASHYEKLKGSPEDNEQKQLFVEQHKHYLDEIIEQISEFSKRVILADANLDKVLSAYNKHRDKPIREQAENIIHLFTLTNLGAPAAFKYFDTTIDRKRYTSTKEVLDATLIHQSITGLYETRIDLSQLGGD

SEQ ID NO: 270 - protein, 1554 aa, synthetic construct
  REGION 1..1554: note = 108 Cas9 TadAins 1026 polypeptide sequence
MDKKYSIGLAIGTNSVGWAVITDEYKVPSKKFKVLGNTDRHSIKKNLIGALLFDSGETAEATRLKRTARRRYTRRKNRICYLQEIFSNEMAKVDDSFFHRLEESFLVEEDKKHERHPIFGNIVDEVAYHEKYPTIYHLRKKLVDSTDKADLRLIYLALAHMIKFRGHFLIEGDLNPDNSDVDKLFIQLVQTYNQLFEENPINASGVDAKAILSARLSKSRRLENLIAQLPGEKKNGLFGNLIALSLGLTPNFKSNFDLAEDAKLQLSKDTYDDDLDNLLAQIGDQYADLFLAAKNLSDAILLSDILRVNTEITKAPLSASMIKRYDEHHQDLTLLKALVRQQLPEKYKEIFFDQSKNGYAGYIDGGASQEEFYKFIKPILEKMDGTEELLVKLNREDLLRKQRTFDNGSIPHQIHLGELHAILRRQEDFYPFLKDNREKIEKILTFRIPYYVGPLARGNSRFAWMTRKSEETITPWNFEEVVDKGASAQSFIERMTNFDKNLPNEKVLPKHSLLYEYFTVYNELTKVKYVTEGMRKPAFLSGEQKKAIVDLLFKTNRKVTVKQLKEDYFKKIECFDSVEISGVEDRFNASLGTYHDLLKIIKDKDFLDNEENEDILEDIVLTLTLFEDREMIEERLKTYAHLFDDKVMKQLKRRRYTGWGRLSRKLINGIRDKQSGKTILDFLKSDGFANRNFMQLIHDDSLTFKEDIQKAQVSGQGDSLHEHIANLAGSPAIKKGILQTVKVVDELVKVMGRHKPENIVIEMARENQTTQKGQKNSRERMKRIEEGIKELGSQILKEHPVENTQLQNEKLYLYYLQNGRDMYVDQELDINRLSDYDVDHIVPQSFLKDDSIDNKVLTRSDKNRGKSDNVPSEEVVKKMKNYWRQLLNAKLITQRKFDNLTKAERGGLSELDKAGFIKRQLVETRQITKHVAQILDSRMNTKYDENDKLIREVKVITLKSKLVSDFRKDFQFYKVREINNYHHAHDAYLNAVVGTALIKKYPKLESEFVYGDYKVYDVRKMIAKSEGSSGSETPGTSESATPESSGSEVEFSHEYWMRHALTLAKRARDEREVPVGAVLVLNNRVIGEGWNRAIGLHDPTAHAEIMALRQGGLVMQNYRLIDATLYVTFEPCVMCAGAMIHSRIGRVVFGVRNAKTGAAGSLMDVLHYPGMNHRVEITEGILADECAALLCYFFRMPRQVFNAQKKAQSSTDQEIGKATAKYFFYSNIMNFFKTEITLANGEIRKRPLIETNGETGEIVWDKGRDFATVRKVLSMPQVNIVKKTEVQTGGFSKESILPKRNSDKLIARKKDWDPKKYGGFDSPTVAYSVLVVAKVEKGKSKKLKSVKELLGITIMERSSFEKNPIDFLEAKGYKEVKKDLIIKLPKYSLFELENGRKRMLASAGELQKGNELALPSKYVNFLYLASHYEKLKGSPEDNEQKQLFVEQHKHYLDEIIEQISEFSKRVILADANLDKVLSAYNKHRDKPIREQAENIIHLFTLTNLGAPAAFKYFDTTIDRKRYTSTKEVLDATLIHQSITGLYETRIDLSQLGGD

SEQ ID NO: 271 - protein, 1540 aa, synthetic construct
  REGION 1..1540: note = 109 Cas9 TadAins 768 polypeptide sequence
MDKKYSIGLAIGTNSVGWAVITDEYKVPSKKFKVLGNTDRHSIKKNLIGALLFDSGETAEATRLKRTARRRYTRRKNRICYLQEIFSNEMAKVDDSFFHRLEESFLVEEDKKHERHPIFGNIVDEVAYHEKYPTIYHLRKKLVDSTDKADLRLIYLALAHMIKFRGHFLIEGDLNPDNSDVDKLFIQLVQTYNQLFEENPINASGVDAKAILSARLSKSRRLENLIAQLPGEKKNGLFGNLIALSLGLTPNFKSNFDLAEDAKLQLSKDTYDDDLDNLLAQIGDQYADLFLAAKNLSDAILLSDILRVNTEITKAPLSASMIKRYDEHHQDLTLLKALVRQQLPEKYKEIFFDQSKNGYAGYIDGGASQEEFYKFIKPILEKMDGTEELLVKLNREDLLRKQRTFDNGSIPHQIHLGELHAILRRQEDFYPFLKDNREKIEKILTFRIPYYVGPLARGNSRFAWMTRKSEETITPWNFEEVVDKGASAQSFIERMTNFDKNLPNEKVLPKHSLLYEYFTVYNELTKVKYVTEGMRKPAFLSGEQKKAIVDLLFKTNRKVTVKQLKEDYFKKIECFDSVEISGVEDRFNASLGTYHDLLKIIKDKDFLDNEENEDILEDIVLTLTLFEDREMIEERLKTYAHLFDDKVMKQLKRRRYTGWGRLSRKLINGIRDKQSGKTILDFLKSDGFANRNFMQLIHDDSLTFKEDIQKAQVSGQGDSLHEHIANLAGSPAIKKGILQTVKVVDELVKVMGRHKPENIVIEMARENQGSSGSETPGTSESATPESSGSEVEFSHEYWMRHALTLAKRARDEREVPVGAVLVLNNRVIGEGWNRAIGLHDPTAHAEIMALRQGGLVMQNYRLIDATLYVTFEPCVMCAGAMIHSRIGRVVFGVRNAKTGAAGSLMDVLHYPGMNHRVEITEGILADECAALLCYFFRMPRTTQKGQKNSRERMKRIEEGIKELGSQILKEHPVENTQLQNEKLYLYYLQNGRDMYVDQELDINRLSDYDVDHIVPQSFLKDDSIDNKVLTRSDKNRGKSDNVPSEEVVKKMKNYWRQLLNAKLITQRKFDNLTKAERGGLSELDKAGFIKRQLVETRQITKHVAQILDSRMNTKYDENDKLIREVKVITLKSKLVSDFRKDFQFYKVREINNYHHAHDAYLNAVVGTALIKKYPKLESEFVYGDYKVYDVRKMIAKSEQEIGKATAKYFFYSNIMNFFKTEITLANGEIRKRPLIETNGETGEIVWDKGRDFATVRKVLSMPQVNIVKKTEVQTGGFSKESILPKRNSDKLIARKKDWDPKKYGGFDSPTVAYSVLVVAKVEKGKSKKLKSVKELLGITIMERSSFEKNPIDFLEAKGYKEVKKDLIIKLPKYSLFELENGRKRMLASAGELQKGNELALPSKYVNFLYLASHYEKLKGSPEDNEQKQLFVEQHKHYLDEIIEQISEFSKRVILADANLDKVLSAYNKHRDKPIREQAENIIHLFTLTNLGAPAAFKYFDTTIDRKRYTSTKEVLDATLIHQSITGLYETRIDLSQLGGD

SEQ ID NO: 272 - protein, 1540 aa, synthetic construct
  REGION 1..1540: note = 110.1 Cas9 TadAins 1250 polypeptide sequence
MDKKYSIGLAIGTNSVGWAVITDEYKVPSKKFKVLGNTDRHSIKKNLIGALLFDSGETAEATRLKRTARRRYTRRKNRICYLQEIFSNEMAKVDDSFFHRLEESFLVEEDKKHERHPIFGNIVDEVAYHEKYPTIYHLRKKLVDSTDKADLRLIYLALAHMIKFRGHFLIEGDLNPDNSDVDKLFIQLVQTYNQLFEENPINASGVDAKAILSARLSKSRRLENLIAQLPGEKKNGLFGNLIALSLGLTPNFKSNFDLAEDAKLQLSKDTYDDDLDNLLAQIGDQYADLFLAAKNLSDAILLSDILRVNTEITKAPLSASMIKRYDEHHQDLTLLKALVRQQLPEKYKEIFFDQSKNGYAGYIDGGASQEEFYKFIKPILEKMDGTEELLVKLNREDLLRKQRTFDNGSIPHQIHLGELHAILRRQEDFYPFLKDNREKIEKILTFRIPYYVGPLARGNSRFAWMTRKSEETITPWNFEEVVDKGASAQSFIERMTNFDKNLPNEKVLPKHSLLYEYFTVYNELTKVKYVTEGMRKPAFLSGEQKKAIVDLLFKTNRKVTVKQLKEDYFKKIECFDSVEISGVEDRFNASLGTYHDLLKIIKDKDFLDNEENEDILEDIVLTLTLFEDREMIEERLKTYAHLFDDKVMKQLKRRRYTGWGRLSRKLINGIRDKQSGKTILDFLKSDGFANRNFMQLIHDDSLTFKEDIQKAQVSGQGDSLHEHIANLAGSPAIKKGILQTVKVVDELVKVMGRHKPENIVIEMARENQTTQKGQKNSRERMKRIEEGIKELGSQILKEHPVENTQLQNEKLYLYYLQNGRDMYVDQELDINRLSDYDVDHIVPQSFLKDDSIDNKVLTRSDKNRGKSDNVPSEEVVKKMKNYWRQLLNAKLITQRKFDNLTKAERGGLSELDKAGFIKRQLVETRQITKHVAQILDSRMNTKYDENDKLIREVKVITLKSKLVSDFRKDFQFYKVREINNYHHAHDAYLNAVVGTALIKKYPKLESEFVYGDYKVYDVRKMIAKSEQEIGKATAKYFFYSNIMNFFKTEITLANGEIRKRPLIETNGETGEIVWDKGRDFATVRKVLSMPQVNIVKKTEVQTGGFSKESILPKRNSDKLIARKKDWDPKKYGGFDSPTVAYSVLVVAKVEKGKSKKLKSVKELLGITIMERSSFEKNPIDFLEAKGYKEVKKDLIIKLPKYSLFELENGRKRMLASAGELQKGNELALPSKYVNFLYLASHYEKLKGSPGSSGSETPGTSESATPESSGSEVEFSHEYWMRHALTLAKRARDEREVPVGAVLVLNNRVIGEGWNRAIGLHDPTAHAEIMALRQGGLVMQNYRLIDATLYVTFEPCVMCAGAMIHSRIGRVVFGVRNAKTGAAGSLMDVLHYPGMNHRVEITEGILADECAALLCYFFRMPREDNEQKQLFVEQHKHYLDEIIEQISEFSKRVILADANLDKVLSAYNKHRDKPIREQAENIIHLFTLTNLGAPAAFKYFDTTIDRKRYTSTKEVLDATLIHQSITGLYETRIDLSQLGGD

SEQ ID NO: 273 - protein, 1543 aa, synthetic construct
  REGION 1..1543: note = 110.2 Cas9 TadAins 1250 polypeptide sequence
MDKKYSIGLAIGTNSVGWAVITDEYKVPSKKFKVLGNTDRHSIKKNLIGALLFDSGETAEATRLKRTARRRYTRRKNRICYLQEIFSNEMAKVDDSFFHRLEESFLVEEDKKHERHPIFGNIVDEVAYHEKYPTIYHLRKKLVDSTDKADLRLIYLALAHMIKFRGHFLIEGDLNPDNSDVDKLFIQLVQTYNQLFEENPINASGVDAKAILSARLSKSRRLENLIAQLPGEKKNGLFGNLIALSLGLTPNFKSNFDLAEDAKLQLSKDTYDDDLDNLLAQIGDQYADLFLAAKNLSDAILLSDILRVNTEITKAPLSASMIKRYDEHHQDLTLLKALVRQQLPEKYKEIFFDQSKNGYAGYIDGGASQEEFYKFIKPILEKMDGTEELLVKLNREDLLRKQRTFDNGSIPHQIHLGELHAILRRQEDFYPFLKDNREKIEKILTFRIPYYVGPLARGNSRFAWMTRKSEETITPWNFEEVVDKGASAQSFIERMTNFDKNLPNEKVLPKHSLLYEYFTVYNELTKVKYVTEGMRKPAFLSGEQKKAIVDLLFKTNRKVTVKQLKEDYFKKIECFDSVEISGVEDRFNASLGTYHDLLKIIKDKDFLDNEENEDILEDIVLTLTLFEDREMIEERLKTYAHLFDDKVMKQLKRRRYTGWGRLSRKLINGIRDKQSGKTILDFLKSDGFANRNFMQLIHDDSLTFKEDIQKAQVSGQGDSLHEHIANLAGSPAIKKGILQTVKVVDELVKVMGRHKPENIVIEMARENQTTQKGQKNSRERMKRIEEGIKELGSQILKEHPVENTQLQNEKLYLYYLQNGRDMYVDQELDINRLSDYDVDHIVPQSFLKDDSIDNKVLTRSDKNRGKSDNVPSEEVVKKMKNYWRQLLNAKLITQRKFDNLTKAERGGLSELDKAGFIKRQLVETRQITKHVAQILDSRMNTKYDENDKLIREVKVITLKSKLVSDFRKDFQFYKVREINNYHHAHDAYLNAVVGTALIKKYPKLESEFVYGDYKVYDVRKMIAKSEQEIGKATAKYFFYSNIMNFFKTEITLANGEIRKRPLIETNGETGEIVWDKGRDFATVRKVLSMPQVNIVKKTEVQTGGFSKESILPKRNSDKLIARKKDWDPKKYGGFDSPTVAYSVLVVAKVEKGKSKKLKSVKELLGITIMERSSFEKNPIDFLEAKGYKEVKKDLIIKLPKYSLFELENGRKRMLASAGELQKGNELALPSKYVNFLYLASHYEKLKGSPGSSGSSGSETPGTSESATPESSGSEVEFSHEYWMRHALTLAKRARDEREVPVGAVLVLNNRVIGEGWNRAIGLHDPTAHAEIMALRQGGLVMQNYRLIDATLYVTFEPCVMCAGAMIHSRIGRVVFGVRNAKTGAAGSLMDVLHYPGMNHRVEITEGILADECAALLCYFFRMPREDNEQKQLFVEQHKHYLDEIIEQISEFSKRVILADANLDKVLSAYNKHRDKPIREQAENIIHLFTLTNLGAPAAFKYFDTTIDRKRYTSTKEVLDATLIHQSITGLYETRIDLSQLGGD

SEQ ID NO: 274 - protein, 1546 aa, synthetic construct
  REGION 1..1546: note = 110.3 Cas9 TadAins 1250 polypeptide sequence
MDKKYSIGLAIGTNSVGWAVITDEYKVPSKKFKVLGNTDRHSIKKNLIGALLFDSGETAEATRLKRTARRRYTRRKNRICYLQEIFSNEMAKVDDSFFHRLEESFLVEEDKKHERHPIFGNIVDEVAYHEKYPTIYHLRKKLVDSTDKADLRLIYLALAHMIKFRGHFLIEGDLNPDNSDVDKLFIQLVQTYNQLFEENPINASGVDAKAILSARLSKSRRLENLIAQLPGEKKNGLFGNLIALSLGLTPNFKSNFDLAEDAKLQLSKDTYDDDLDNLLAQIGDQYADLFLAAKNLSDAILLSDILRVNTEITKAPLSASMIKRYDEHHQDLTLLKALVRQQLPEKYKEIFFDQSKNGYAGYIDGGASQEEFYKFIKPILEKMDGTEELLVKLNREDLLRKQRTFDNGSIPHQIHLGELHAILRRQEDFYPFLKDNREKIEKILTFRIPYYVGPLARGNSRFAWMTRKSEETITPWNFEEVVDKGASAQSFIERMTNFDKNLPNEKVLPKHSLLYEYFTVYNELTKVKYVTEGMRKPAFLSGEQKKAIVDLLFKTNRKVTVKQLKEDYFKKIECFDSVEISGVEDRFNASLGTYHDLLKIIKDKDFLDNEENEDILEDIVLTLTLFEDREMIEERLKTYAHLFDDKVMKQLKRRRYTGWGRLSRKLINGIRDKQSGKTILDFLKSDGFANRNFMQLIHDDSLTFKEDIQKAQVSGQGDSLHEHIANLAGSPAIKKGILQTVKVVDELVKVMGRHKPENIVIEMARENQTTQKGQKNSRERMKRIEEGIKELGSQILKEHPVENTQLQNEKLYLYYLQNGRDMYVDQELDINRLSDYDVDHIVPQSFLKDDSIDNKVLTRSDKNRGKSDNVPSEEVVKKMKNYWRQLLNAKLITQRKFDNLTKAERGGLSELDKAGFIKRQLVETRQITKHVAQILDSRMNTKYDENDKLIREVKVITLKSKLVSDFRKDFQFYKVREINNYHHAHDAYLNAVVGTALIKKYPKLESEFVYGDYKVYDVRKMIAKSEQEIGKATAKYFFYSNIMNFFKTEITLANGEIRKRPLIETNGETGEIVWDKGRDFATVRKVLSMPQVNIVKKTEVQTGGFSKESILPKRNSDKLIARKKDWDPKKYGGFDSPTVAYSVLVVAKVEKGKSKKLKSVKELLGITIMERSSFEKNPIDFLEAKGYKEVKKDLIIKLPKYSLFELENGRKRMLASAGELQKGNELALPSKYVNFLYLASHYEKLKGSPGSSGSSGSETPGTSESATPESGSSSGSEVEFSHEYWMRHALTLAKRARDEREVPVGAVLVLNNRVIGEGWNRAIGLHDPTAHAEIMALRQGGLVMQNYRLIDATLYVTFEPCVMCAGAMIHSRIGRVVFGVRNAKTGAAGSLMDVLHYPGMNHRVEITEGILADECAALLCYFFRMPREDNEQKQLFVEQHKHYLDEIIEQISEFSKRVILADANLDKVLSAYNKHRDKPIREQAENIIHLFTLTNLGAPAAFKYFDTTIDRKRYTSTKEVLDATLIHQSITGLYETRIDLSQLGGD

SEQ ID NO: 275 - protein, 1546 aa, synthetic construct
  REGION 1..1546: note = 110.4 Cas9 TadAins 1250 polypeptide sequence
MDKKYSIGLAIGTNSVGWAVITDEYKVPSKKFKVLGNTDRHSIKKNLIGALLFDSGETAEATRLKRTARRRYTRRKNRICYLQEIFSNEMAKVDDSFFHRLEESFLVEEDKKHERHPIFGNIVDEVAYHEKYPTIYHLRKKLVDSTDKADLRLIYLALAHMIKFRGHFLIEGDLNPDNSDVDKLFIQLVQTYNQLFEENPINASGVDAKAILSARLSKSRRLENLIAQLPGEKKNGLFGNLIALSLGLTPNFKSNFDLAEDAKLQLSKDTYDDDLDNLLAQIGDQYADLFLAAKNLSDAILLSDILRVNTEITKAPLSASMIKRYDEHHQDLTLLKALVRQQLPEKYKEIFFDQSKNGYAGYIDGGASQEEFYKFIKPILEKMDGTEELLVKLNREDLLRKQRTFDNGSIPHQIHLGELHAILRRQEDFYPFLKDNREKIEKILTFRIPYYVGPLARGNSRFAWMTRKSEETITPWNFEEVVDKGASAQSFIERMTNFDKNLPNEKVLPKHSLLYEYFTVYNELTKVKYVTEGMRKPAFLSGEQKKAIVDLLFKTNRKVTVKQLKEDYFKKIECFDSVEISGVEDRFNASLGTYHDLLKIIKDKDFLDNEENEDILEDIVLTLTLFEDREMIEERLKTYAHLFDDKVMKQLKRRRYTGWGRLSRKLINGIRDKQSGKTILDFLKSDGFANRNFMQLIHDDSLTFKEDIQKAQVSGQGDSLHEHIANLAGSPAIKKGILQTVKVVDELVKVMGRHKPENIVIEMARENQTTQKGQKNSRERMKRIEEGIKELGSQILKEHPVENTQLQNEKLYLYYLQNGRDMYVDQELDINRLSDYDVDHIVPQSFLKDDSIDNKVLTRSDKNRGKSDNVPSEEVVKKMKNYWRQLLNAKLITQRKFDNLTKAERGGLSELDKAGFIKRQLVETRQITKHVAQILDSRMNTKYDENDKLIREVKVITLKSKLVSDFRKDFQFYKVREINNYHHAHDAYLNAVVGTALIKKYPKLESEFVYGDYKVYDVRKMIAKSEQEIGKATAKYFFYSNIMNFFKTEITLANGEIRKRPLIETNGETGEIVWDKGRDFATVRKVLSMPQVNIVKKTEVQTGGFSKESILPKRNSDKLIARKKDWDPKKYGGFDSPTVAYSVLVVAKVEKGKSKKLKSVKELLGITIMERSSFEKNPIDFLEAKGYKEVKKDLIIKLPKYSLFELENGRKRMLASAGELQKGNELALPSKYVNFLYLASHYEKLKGSPGSSGSSGSETPGTSESATPESGSSSGSEVEFSHEYWMRHALTLAKRARDEREVPVGAVLVLNNRVIGEGWNRAIGLHDPTAHAEIMALRQGGLVMQNYRLIDATLYVTFEPCVMCAGAMIHSRIGRVVFGVRNAKTGAAGSLMDVLHYPGMNHRVEITEGILADECAALLCYFFRMRREDNEQKQLFVEQHKHYLDEIIEQISEFSKRVILADANLDKVLSAYNKHRDKPIREQAENIIHLFTLTNLGAPAAFKYFDTTIDRKRYTSTKEVLDATLIHQSITGLYETRIDLSQLGGD

SEQ ID NO: 276 - protein, 1546 aa, synthetic construct
  REGION 1..1546: note = 110.5 Cas9 TadAins 1249 polypeptide sequence
MDKKYSIGLAIGTNSVGWAVITDEYKVPSKKFKVLGNTDRHSIKKNLIGALLFDSGETAEATRLKRTARRRYTRRKNRICYLQEIFSNEMAKVDDSFFHRLEESFLVEEDKKHERHPIFGNIVDEVAYHEKYPTIYHLRKKLVDSTDKADLRLIYLALAHMIKFRGHFLIEGDLNPDNSDVDKLFIQLVQTYNQLFEENPINASGVDAKAILSARLSKSRRLENLIAQLPGEKKNGLFGNLIALSLGLTPNFKSNFDLAEDAKLQLSKDTYDDDLDNLLAQIGDQYADLFLAAKNLSDAILLSDILRVNTEITKAPLSASMIKRYDEHHQDLTLLKALVRQQLPEKYKEIFFDQSKNGYAGYIDGGASQEEFYKFIKPILEKMDGTEELLVKLNREDLLRKQRTFDNGSIPHQIHLGELHAILRRQEDFYPFLKDNREKIEKILTFRIPYYVGPLARGNSRFAWMTRKSEETITPWNFEEVVDKGASAQSFIERMTNFDKNLPNEKVLPKHSLLYEYFTVYNELTKVKYVTEGMRKPAFLSGEQKKAIVDLLFKTNRKVTVKQLKEDYFKKIECFDSVEISGVEDRFNASLGTYHDLLKIIKDKDFLDNEENEDILEDIVLTLTLFEDREMIEERLKTYAHLFDDKVMKQLKRRRYTGWGRLSRKLINGIRDKQSGKTILDFLKSDGFANRNFMQLIHDDSLTFKEDIQKAQVSGQGDSLHEHIANLAGSPAIKKGILQTVKVVDELVKVMGRHKPENIVIEMARENQTTQKGQKNSRERMKRIEEGIKELGSQILKEHPVENTQLQNEKLYLYYLQNGRDMYVDQELDINRLSDYDVDHIVPQSFLKDDSIDNKVLTRSDKNRGKSDNVPSEEVVKKMKNYWRQLLNAKLITQRKFDNLTKAERGGLSELDKAGFIKRQLVETRQITKHVAQILDSRMNTKYDENDKLIREVKVITLKSKLVSDFRKDFQFYKVREINNYHHAHDAYLNAVVGTALIKKYPKLESEFVYGDYKVYDVRKMIAKSEQEIGKATAKYFFYSNIMNFFKTEITLANGEIRKRPLIETNGETGEIVWDKGRDFATVRKVLSMPQVNIVKKTEVQTGGFSKESILPKRNSDKLIARKKDWDPKKYGGFDSPTVAYSVLVVAKVEKGKSKKLKSVKELLGITIMERSSFEKNPIDFLEAKGYKEVKKDLIIKLPKYSLFELENGRKRMLASAGELQKGNELALPSKYVNFLYLASHYEKLKGSGSSGSSGSETPGTSESATPESGSSSGSEVEFSHEYWMRHALTLAKRARDEREVPVGAVLVLNNRVIGEGWNRAIGLHDPTAHAEIMALRQGGLVMQNYRLIDATLYVTFEPCVMCAGAMIHSRIGRVVFGVRNAKTGAAGSLMDVLHYPGMNHRVEITEGILADECAALLCYFFRMRRPEDNEQKQLFVEQHKHYLDEIIEQISEFSKRVILADANLDKVLSAYNKHRDKPIREQAENIIHLFTLTNLGAPAAFKYFDTTIDRKRYTSTKEVLDATLIHQSITGLYETRIDLSQLGGD

SEQ ID NO: 277 - protein, 1551 aa, synthetic construct
  REGION 1..1551: note = 110.5 Cas9 TadAins delta59-66 1250 polypeptide sequence
MDKKYSIGLAIGTNSVGWAVITDEYKVPSKKFKVLGNTDRHSIKKNLIGALLFDSGETAEATRLKRTARRRYTRRKNRICYLQEIFSNEMAKVDDSFFHRLEESFLVEEDKKHERHPIFGNIVDEVAYHEKYPTIYHLRKKLVDSTDKADLRLIYLALAHMIKFRGHFLIEGDLNPDNSDVDKLFIQLVQTYNQLFEENPINASGVDAKAILSARLSKSRRLENLIAQLPGEKKNGLFGNLIALSLGLTPNFKSNFDLAEDAKLQLSKDTYDDDLDNLLAQIGDQYADLFLAAKNLSDAILLSDILRVNTEITKAPLSASMIKRYDEHHQDLTLLKALVRQQLPEKYKEIFFDQSKNGYAGYIDGGASQEEFYKFIKPILEKMDGTEELLVKLNREDLLRKQRTFDNGSIPHQIHLGELHAILRRQEDFYPFLKDNREKIEKILTFRIPYYVGPLARGNSRFAWMTRKSEETITPWNFEEVVDKGASAQSFIERMTNFDKNLPNEKVLPKHSLLYEYFTVYNELTKVKYVTEGMRKPAFLSGEQKKAIVDLLFKTNRKVTVKQLKEDYFKKIECFDSVEISGVEDRFNASLGTYHDLLKIIKDKDFLDNEENEDILEDIVLTLTLFEDREMIEERLKTYAHLFDDKVMKQLKRRRYTGWGRLSRKLINGIRDKQSGKTILDFLKSDGFANRNFMQLIHDDSLTFKEDIQKAQVSGQGDSLHEHIANLAGSPAIKKGILQTVKVVDELVKVMGRHKPENIVIEMARENQTTQKGQKNSRERMKRIEEGIKELGSQILKEHPVENTQLQNEKLYLYYLQNGRDMYVDQELDINRLSDYDVDHIVPQSFLKDDSIDNKVLTRSDKNRGKSDNVPSEEVVKKMKNYWRQLLNAKLITQRKFDNLTKAERGGLSELDKAGFIKRQLVETRQITKHVAQILDSRMNTKYDENDKLIREVKVITLKSKLVSDFRKDFQFYKVREINNYHHAHDAYLNAVVGTALIKKYPKLESEFVYGDYKVYDVRKMIAKSEQEIGKATAKYFFYSNIMNFFKTEITLANGEIRKRPLIETNGETGEIVWDKGRDFATVRKVLSMPQVNIVKKTEVQTGGFSKESILPKRNSDKLIARKKDWDPKKYGGFDSPTVAYSVLVVAKVEKGKSKKLKSVKELLGITIMERSSFEKNPIDFLEAKGYKEVKKDLIIKLPKYSLFELENGRKRMLASAGELQKGNELALPSKYVNFLYLASHYEKLKGSPGSSGSSGSETPGTSESATPESGSSGSEVEFSHEYWMRHALTLAKRARDEREVPVGAVLVLNNRVIGEGWNRAHAEIMALRQGGLVMQNYRLIDATLYVTFEPCVMCAGAMIHSRIGRVVFGVRNAKTGAAGSLMDVLHYPGMNHRVEITEGILADECAALLCYFFRMPRQVFNAQKKAQSSTDEDNEQKQLFVEQHKHYLDEIIEQISEFSKRVILADANLDKVLSAYNKHRDKPIREQAENIIHLFTLTNLGAPAAFKYFDTTIDRKRYTSTKEVLDATLIHQSITGLYETRIDLSQLGGD

SEQ ID NO: 278 - protein, 1546 aa, synthetic construct
  REGION 1..1546: note = 110.6 Cas9 TadAins 1251 polypeptide sequence
MDKKYSIGLAIGTNSVGWAVITDEYKVPSKKFKVLGNTDRHSIKKNLIGALLFDSGETAEATRLKRTARRRYTRRKNRICYLQEIFSNEMAKVDDSFFHRLEESFLVEEDKKHERHPIFGNIVDEVAYHEKYPTIYHLRKKLVDSTDKADLRLIYLALAHMIKFRGHFLIEGDLNPDNSDVDKLFIQLVQTYNQLFEENPINASGVDAKAILSARLSKSRRLENLIAQLPGEKKNGLFGNLIALSLGLTPNFKSNFDLAEDAKLQLSKDTYDDDLDNLLAQIGDQYADLFLAAKNLSDAILLSDILRVNTEITKAPLSASMIKRYDEHHQDLTLLKALVRQQLPEKYKEIFFDQSKNGYAGYIDGGASQEEFYKFIKPILEKMDGTEELLVKLNREDLLRKQRTFDNGSIPHQIHLGELHAILRRQEDFYPFLKDNREKIEKILTFRIPYYVGPLARGNSRFAWMTRKSEETITPWNFEEVVDKGASAQSFIERMTNFDKNLPNEKVLPKHSLLYEYFTVYNELTKVKYVTEGMRKPAFLSGEQKKAIVDLLFKTNRKVTVKQLKEDYFKKIECFDSVEISGVEDRFNASLGTYHDLLKIIKDKDFLDNEENEDILEDIVLTLTLFEDREMIEERLKTYAHLFDDKVMKQLKRRRYTGWGRLSRKLINGIRDKQSGKTILDFLKSDGFANRNFMQLIHDDSLTFKEDIQKAQVSGQGDSLHEHIANLAGSPAIKKGILQTVKVVDELVKVMGRHKPENIVIEMARENQTTQKGQKNSRERMKRIEEGIKELGSQILKEHPVENTQLQNEKLYLYYLQNGRDMYVDQELDINRLSDYDVDHIVPQSFLKDDSIDNKVLTRSDKNRGKSDNVPSEEVVKKMKNYWRQLLNAKLITQRKFDNLTKAERGGLSELDKAGFIKRQLVETRQITKHVAQILDSRMNTKYDENDKLIREVKVITLKSKLVSDFRKDFQFYKVREINNYHHAHDAYLNAVVGTALIKKYPKLESEFVYGDYKVYDVRKMIAKSEQEIGKATAKYFFYSNIMNFFKTEITLANGEIRKRPLIETNGETGEIVWDKGRDFATVRKVLSMPQVNIVKKTEVQTGGFSKESILPKRNSDKLIARKKDWDPKKYGGFDSPTVAYSVLVVAKVEKGKSKKLKSVKELLGITIMERSSFEKNPIDFLEAKGYKEVKKDLIIKLPKYSLFELENGRKRMLASAGELQKGNELALPSKYVNFLYLASHYEKLKGSPEGSSGSSGSETPGTSESATPESGSSSGSEVEFSHEYWMRHALTLAKRARDEREVPVGAVLVLNNRVIGEGWNRAIGLHDPTAHAEIMALRQGGLVMQNYRLIDATLYVTFEPCVMCAGAMIHSRIGRVVFGVRNAKTGAAGSLMDVLHYPGMNHRVEITEGILADECAALLCYFFRMRRDNEQKQLFVEQHKHYLDEIIEQISEFSKRVILADANLDKVLSAYNKHRDKPIREQAENIIHLFTLTNLGAPAAFKYFDTTIDRKRYTSTKEVLDATLIHQSITGLYETRIDLSQLGGD

SEQ ID NO: 279 - protein, 1546 aa, synthetic construct
  REGION 1..1546: note = 110.7 Cas9 TadAins 1252 polypeptide sequence
MDKKYSIGLAIGTNSVGWAVITDEYKVPSKKFKVLGNTDRHSIKKNLIGALLFDSGETAEATRLKRTARRRYTRRKNRICYLQEIFSNEMAKVDDSFFHRLEESFLVEEDKKHERHPIFGNIVDEVAYHEKYPTIYHLRKKLVDSTDKADLRLIYLALAHMIKFRGHFLIEGDLNPDNSDVDKLFIQLVQTYNQLFEENPINASGVDAKAILSARLSKSRRLENLIAQLPGEKKNGLFGNLIALSLGLTPNFKSNFDLAEDAKLQLSKDTYDDDLDNLLAQIGDQYADLFLAAKNLSDAILLSDILRVNTEITKAPLSASMIKRYDEHHQDLTLLKALVRQQLPEKYKEIFFDQSKNGYAGYIDGGASQEEFYKFIKPILEKMDGTEELLVKLNREDLLRKQRTFDNGSIPHQIHLGELHAILRRQEDFYPFLKDNREKIEKILTFRIPYYVGPLARGNSRFAWMTRKSEETITPWNFEEVVDKGASAQSFIERMTNFDKNLPNEKVLPKHSLLYEYFTVYNELTKVKYVTEGMRKPAFLSGEQKKAIVDLLFKTNRKVTVKQLKEDYFKKIECFDSVEISGVEDRFNASLGTYHDLLKIIKDKDFLDNEENEDILEDIVLTLTLFEDREMIEERLKTYAHLFDDKVMKQLKRRRYTGWGRLSRKLINGIRDKQSGKTILDFLKSDGFANRNFMQLIHDDSLTFKEDIQKAQVSGQGDSLHEHIANLAGSPAIKKGILQTVKVVDELVKVMGRHKPENIVIEMARENQTTQKGQKNSRERMKRIEEGIKELGSQILKEHPVENTQLQNEKLYLYYLQNGRDMYVDQELDINRLSDYDVDHIVPQSFLKDDSIDNKVLTRSDKNRGKSDNVPSEEVVKKMKNYWRQLLNAKLITQRKFDNLTKAERGGLSELDKAGFIKRQLVETRQITKHVAQILDSRMNTKYDENDKLIREVKVITLKSKLVSDFRKDFQFYKVREINNYHHAHDAYLNAVVGTALIKKYPKLESEFVYGDYKVYDVRKMIAKSEQEIGKATAKYFFYSNIMNFFKTEITLANGEIRKRPLIETNGETGEIVWDKGRDFATVRKVLSMPQVNIVKKTEVQTGGFSKESILPKRNSDKLIARKKDWDPKKYGGFDSPTVAYSVLVVAKVEKGKSKKLKSVKELLGITIMERSSFEKNPIDFLEAKGYKEVKKDLIIKLPKYSLFELENGRKRMLASAGELQKGNELALPSKYVNFLYLASHYEKLKGSPEDGSSGSSGSETPGTSESATPESGSSSGSEVEFSHEYWMRHALTLAKRARDEREVPVGAVLVLNNRVIGEGWNRAIGLHDPTAHAEIMALRQGGLVMQNYRLIDATLYVTFEPCVMCAGAMIHSRIGRVVFGVRNAKTGAAGSLMDVLHYPGMNHRVEITEGILADECAALLCYFFRMRRNEQKQLFVEQHKHYLDEIIEQISEFSKRVILADANLDKVLSAYNKHRDKPIREQAENIIHLFTLTNLGAPAAFKYFDTTIDRKRYTSTKEVLDATLIHQSITGLYETRIDLSQLGGD

SEQ ID NO: 280 - protein, 1533 aa, synthetic construct
  REGION 1..1533: note = 110.8 Cas9 TadAins delta59-66 C-truncate 1250 polypeptide sequence
MDKKYSIGLAIGTNSVGWAVITDEYKVPSKKFKVLGNTDRHSIKKNLIGALLFDSGETAEATRLKRTARRRYTRRKNRICYLQEIFSNEMAKVDDSFFHRLEESFLVEEDKKHERHPIFGNIVDEVAYHEKYPTIYHLRKKLVDSTDKADLRLIYLALAHMIKFRGHFLIEGDLNPDNSDVDKLFIQLVQTYNQLFEENPINASGVDAKAILSARLSKSRRLENLIAQLPGEKKNGLFGNLIALSLGLTPNFKSNFDLAEDAKLQLSKDTYDDDLDNLLAQIGDQYADLFLAAKNLSDAILLSDILRVNTEITKAPLSASMIKRYDEHHQDLTLLKALVRQQLPEKYKEIFFDQSKNGYAGYIDGGASQEEFYKFIKPILEKMDGTEELLVKLNREDLLRKQRTFDNGSIPHQIHLGELHAILRRQEDFYPFLKDNREKIEKILTFRIPYYVGPLARGNSRFAWMTRKSEETITPWNFEEVVDKGASAQSFIERMTNFDKNLPNEKVLPKHSLLYEYFTVYNELTKVKYVTEGMRKPAFLSGEQKKAIVDLLFKTNRKVTVKQLKEDYFKKIECFDSVEISGVEDRFNASLGTYHDLLKIIKDKDFLDNEENEDILEDIVLTLTLFEDREMIEERLKTYAHLFDDKVMKQLKRRRYTGWGRLSRKLINGIRDKQSGKTILDFLKSDGFANRNFMQLIHDDSLTFKEDIQKAQVSGQGDSLHEHIANLAGSPAIKKGILQTVKVVDELVKVMGRHKPENIVIEMARENQTTQKGQKNSRERMKRIEEGIKELGSQILKEHPVENTQLQNEKLYLYYLQNGRDMYVDQELDINRLSDYDVDHIVPQSFLKDDSIDNKVLTRSDKNRGKSDNVPSEEVVKKMKNYWRQLLNAKLITQRKFDNLTKAERGGLSELDKAGFIKRQLVETRQITKHVAQILDSRMNTKYDENDKLIREVKVITLKSKLVSDFRKDFQFYKVREINNYHHAHDAYLNAVVGTALIKKYPKLESEFVYGDYKVYDVRKMIAKSEQEIGKATAKYFFYSNIMNFFKTEITLANGEIRKRPLIETNGETGEIVWDKGRDFATVRKVLSMPQVNIVKKTEVQTGGFSKESILPKRNSDKLIARKKDWDPKKYGGFDSPTVAYSVLVVAKVEKGKSKKLKSVKELLGITIMERSSFEKNPIDFLEAKGYKEVKKDLIIKLPKYSLFELENGRKRMLASAGELQKGNELALPSKYVNFLYLASHYEKLKGSPGSSGSETPGTSESATPESSGSEVEFSHEYWMRHALTLAKRARDEREVPVGAVLVLNNRVIGEGWNRAHAEIMALRQGGLVMQNYRLIDATLYVTFEPCVMCAGAMIHSRIGRVVFGVRNAKTGAAGSLMDVLHYPGMNHRVEITEGILADECAALLCYFFRMPRQEDNEQKQLFVEQHKHYLDEIIEQISEFSKRVILADANLDKVLSAYNKHRDKPIREQAENIIHLFTLTNLGAPAAFKYFDTTIDRKRYTSTKEVLDATLIHQSITGLYETRIDLSQLGGD

SEQ ID NO: 281 - protein, 1549 aa, synthetic construct
  REGION 1..1549: note = 111.1 Cas9 TadAins 997 polypeptide sequence
MDKKYSIGLAIGTNSVGWAVITDEYKVPSKKFKVLGNTDRHSIKKNLIGALLFDSGETAEATRLKRTARRRYTRRKNRICYLQEIFSNEMAKVDDSFFHRLEESFLVEEDKKHERHPIFGNIVDEVAYHEKYPTIYHLRKKLVDSTDKADLRLIYLALAHMIKFRGHFLIEGDLNPDNSDVDKLFIQLVQTYNQLFEENPINASGVDAKAILSARLSKSRRLENLIAQLPGEKKNGLFGNLIALSLGLTPNFKSNFDLAEDAKLQLSKDTYDDDLDNLLAQIGDQYADLFLAAKNLSDAILLSDILRVNTEITKAPLSASMIKRYDEHHQDLTLLKALVRQQLPEKYKEIFFDQSKNGYAGYIDGGASQEEFYKFIKPILEKMDGTEELLVKLNREDLLRKQRTFDNGSIPHQIHLGELHAILRRQEDFYPFLKDNREKIEKILTFRIPYYVGPLARGNSRFAWMTRKSEETITPWNFEEVVDKGASAQSFIERMTNFDKNLPNEKVLPKHSLLYEYFTVYNELTKVKYVTEGMRKPAFLSGEQKKAIVDLLFKTNRKVTVKQLKEDYFKKIECFDSVEISGVEDRFNASLGTYHDLLKIIKDKDFLDNEENEDILEDIVLTLTLFEDREMIEERLKTYAHLFDDKVMKQLKRRRYTGWGRLSRKLINGIRDKQSGKTILDFLKSDGFANRNFMQLIHDDSLTFKEDIQKAQVSGQGDSLHEHIANLAGSPAIKKGILQTVKVVDELVKVMGRHKPENIVIEMARENQTTQKGQKNSRERMKRIEEGIKELGSQILKEHPVENTQLQNEKLYLYYLQNGRDMYVDQELDINRLSDYDVDHIVPQSFLKDDSIDNKVLTRSDKNRGKSDNVPSEEVVKKMKNYWRQLLNAKLITQRKFDNLTKAERGGLSELDKAGFIKRQLVETRQITKHVAQILDSRMNTKYDENDKLIREVKVITLKSKLVSDFRKDFQFYKVREINNYHHAHDAYLNAVVGTALSHEYWMRHALTLAKRARDEREVPVGAVLVLNNRVIGEGWNRAIGLHDPTAHAEIMALRQGGLVMQNYRLIDATLYVTFEPCVMCAGAMIHSRIGRVVFGVRNAKTGAAGSLMDVLHYPGMNHRVEITEGILADECAALLCYFFRMPRQVFNAQKKAQSSTDGSSGSETPGTSESATPESSGIKKYPKLESEFVYGDYKVYDVRKMIAKSEQEIGKATAKYFFYSNIMNFFKTEITLANGEIRKRPLIETNGETGEIVWDKGRDFATVRKVLSMPQVNIVKKTEVQTGGFSKESILPKRNSDKLIARKKDWDPKKYGGFDSPTVAYSVLVVAKVEKGKSKKLKSVKELLGITIMERSSFEKNPIDFLEAKGYKEVKKDLIIKLPKYSLFELENGRKRMLASAGELQKGNELALPSKYVNFLYLASHYEKLKGSPEDNEQKQLFVEQHKHYLDEIIEQISEFSKRVILADANLDKVLSAYNKHRDKPIREQAENIIHLFTLTNLGAPAAFKYFDTTIDRKRYTSTKEVLDATLIHQSITGLYETRIDLSQLGGD

SEQ ID NO: 282 - protein, 1555 aa, synthetic construct
  REGION 1..1555: note = 111.2 Cas9 TadAins 997 polypeptide sequence
MDKKYSIGLAIGTNSVGWAVITDEYKVPSKKFKVLGNTDRHSIKKNLIGALLFDSGETAEATRLKRTARRRYTRRKNRICYLQEIFSNEMAKVDDSFFHRLEESFLVEEDKKHERHPIFGNIVDEVAYHEKYPTIYHLRKKLVDSTDKADLRLIYLALAHMIKFRGHFLIEGDLNPDNSDVDKLFIQLVQTYNQLFEENPINASGVDAKAILSARLSKSRRLENLIAQLPGEKKNGLFGNLIALSLGLTPNFKSNFDLAEDAKLQLSKDTYDDDLDNLLAQIGDQYADLFLAAKNLSDAILLSDILRVNTEITKAPLSASMIKRYDEHHQDLTLLKALVRQQLPEKYKEIFFDQSKNGYAGYIDGGASQEEFYKFIKPILEKMDGTEELLVKLNREDLLRKQRTFDNGSIPHQIHLGELHAILRRQEDFYPFLKDNREKIEKILTFRIPYYVGPLARGNSRFAWMTRKSEETITPWNFEEVVDKGASAQSFIERMTNFDKNLPNEKVLPKHSLLYEYFTVYNELTKVKYVTEGMRKPAFLSGEQKKAIVDLLFKTNRKVTVKQLKEDYFKKIECFDSVEISGVEDRFNASLGTYHDLLKIIKDKDFLDNEENEDILEDIVLTLTLFEDREMIEERLKTYAHLFDDKVMKQLKRRRYTGWGRLSRKLINGIRDKQSGKTILDFLKSDGFANRNFMQLIHDDSLTFKEDIQKAQVSGQGDSLHEHIANLAGSPAIKKGILQTVKVVDELVKVMGRHKPENIVIEMARENQTTQKGQKNSRERMKRIEEGIKELGSQILKEHPVENTQLQNEKLYLYYLQNGRDMYVDQELDINRLSDYDVDHIVPQSFLKDDSIDNKVLTRSDKNRGKSDNVPSEEVVKKMKNYWRQLLNAKLITQRKFDNLTKAERGGLSELDKAGFIKRQLVETRQITKHVAQILDSRMNTKYDENDKLIREVKVITLKSKLVSDFRKDFQFYKVREINNYHHAHDAYLNAVVGTALSHEYWMRHALTLAKRARDEREVPVGAVLVLNNRVIGEGWNRAIGLHDPTAHAEIMALRQGGLVMQNYRLIDATLYVTFEPCVMCAGAMIHSRIGRVVFGVRNAKTGAAGSLMDVLHYPGMNHRVEITEGILADECAALLCYFFRMPRQVFNAQKKAQSSTDGSSGSSGSETPGTSESATPESSGGSSIKKYPKLESEFVYGDYKVYDVRKMIAKSEQEIGKATAKYFFYSNIMNFFKTEITLANGEIRKRPLIETNGETGEIVWDKGRDFATVRKVLSMPQVNIVKKTEVQTGGFSKESILPKRNSDKLIARKKDWDPKKYGGFDSPTVAYSVLVVAKVEKGKSKKLKSVKELLGITIMERSSFEKNPIDFLEAKGYKEVKKDLIIKLPKYSLFELENGRKRMLASAGELQKGNELALPSKYVNFLYLASHYEKLKGSPEDNEQKQLFVEQHKHYLDEIIEQISEFSKRVILADANLDKVLSAYNKHRDKPIREQAENIIHLFTLTNLGAPAAFKYFDTTIDRKRYTSTKEVLDATLIHQSITGLYETRIDLSQLGGD

SEQ ID NO: 283 - protein, 1421 aa, synthetic construct
  REGION 1..1421: note = 112 delta HNH TadA polypeptide sequence
MDKKYSIGLAIGTNSVGWAVITDEYKVPSKKFKVLGNTDRHSIKKNLIGALLFDSGETAEATRLKRTARRRYTRRKNRICYLQEIFSNEMAKVDDSFFHRLEESFLVEEDKKHERHPIFGNIVDEVAYHEKYPTIYHLRKKLVDSTDKADLRLIYLALAHMIKFRGHFLIEGDLNPDNSDVDKLFIQLVQTYNQLFEENPINASGVDAKAILSARLSKSRRLENLIAQLPGEKKNGLFGNLIALSLGLTPNFKSNFDLAEDAKLQLSKDTYDDDLDNLLAQIGDQYADLFLAAKNLSDAILLSDILRVNTEITKAPLSASMIKRYDEHHQDLTLLKALVRQQLPEKYKEIFFDQSKNGYAGYIDGGASQEEFYKFIKPILEKMDGTEELLVKLNREDLLRKQRTFDNGSIPHQIHLGELHAILRRQEDFYPFLKDNREKIEKILTFRIPYYVGPLARGNSRFAWMTRKSEETITPWNFEEVVDKGASAQSFIERMTNFDKNLPNEKVLPKHSLLYEYFTVYNELTKVKYVTEGMRKPAFLSGEQKKAIVDLLFKTNRKVTVKQLKEDYFKKIECFDSVEISGVEDRFNASLGTYHDLLKIIKDKDFLDNEENEDILEDIVLTLTLFEDREMIEERLKTYAHLFDDKVMKQLKRRRYTGWGRLSRKLINGIRDKQSGKTILDFLKSDGFANRNFMQLIHDDSLTFKEDIQKAQVSGQGDSLHEHIANLAGSPAIKKGILQTVKVVDELVKVMGRHKPENIVIEMARENQTTQKGQKNSRERMKRIEEGIKELGSEVEFSHEYWMRHALTLAKRARDEREVPVGAVLVLNNRVIGEGWNRAIGLHDPTAHAEIMALRQGGLVMQNYRLIDATLYVTFEPCVMCAGAMIHSRIGRVVFGVRNAKTGAAGSLMDVLHYPGMNHRVEITEGILADECAALLCYFFRMPRQVFNAQKKAQSSTDGGLSELDKAGFIKRQLVETRQITKHVAQILDSRMNTKYDENDKLIREVKVITLKSKLVSDFRKDFQFYKVREINNYHHAHDAYLNAVVGTALIKKYPKLESEFVYGDYKVYDVRKMIAKSEQEIGKATAKYFFYSNIMNFFKTEITLANGEIRKRPLIETNGETGEIVWDKGRDFATVRKVLSMPQVNIVKKTEVQTGGFSKESILPKRNSDKLIARKKDWDPKKYGGFDSPTVAYSVLVVAKVEKGKSKKLKSVKELLGITIMERSSFEKNPIDFLEAKGYKEVKKDLIIKLPKYSLFELENGRKRMLASAGELQKGNELALPSKYVNFLYLASHYEKLKGSPEDNEQKQLFVEQHKHYLDEIIEQISEFSKRVILADANLDKVLSAYNKHRDKPIREQAENIIHLFTLTNLGAPAAFKYFDTTIDRKRYTSTKEVLDATLIHQSITGLYETRIDLSQLGGD

SEQ ID NO: 284 - protein, 1552 aa, synthetic construct
  REGION 1..1552: note = 113 N-term single TadA helixtrunc 165-end polypeptide sequence
MSEVEFSHEYWMRHALTLAKRARDEREVPVGAVLVLNNRVIGEGWNRAIGLHDPTAHAEIMALRQGGLVMQNYRLIDATLYVTFEPCVMCAGAMIHSRIGRVVFGVRNAKTGAAGSLMDVLHYPGMNHRVEITEGILADECAALLCYFFRMPRSGGSSGGSSGSETPGTSESATPESSGGSSGGSDKKYSIGLAIGTNSVGWAVITDEYKVPSKKFKVLGNTDRHSIKKNLIGALLFDSGETAEATRLKRTARRRYTRRKNRICYLQEIFSNEMAKVDDSFFHRLEESFLVEEDKKHERHPIFGNIVDEVAYHEKYPTIYHLRKKLVDSTDKADLRLIYLALAHMIKFRGHFLIEGDLNPDNSDVDKLFIQLVQTYNQLFEENPINASGVDAKAILSARLSKSRRLENLIAQLPGEKKNGLFGNLIALSLGLTPNFKSNFDLAEDAKLQLSKDTYDDDLDNLLAQIGDQYADLFLAAKNLSDAILLSDILRVNTEITKAPLSASMIKRYDEHHQDLTLLKALVRQQLPEKYKEIFFDQSKNGYAGYIDGGASQEEFYKFIKPILEKMDGTEELLVKLNREDLLRKQRTFDNGSIPHQIHLGELHAILRRQEDFYPFLKDNREKIEKILTFRIPYYVGPLARGNSRFAWMTRKSEETITPWNFEEVVDKGASAQSFIERMTNFDKNLPNEKVLPKHSLLYEYFTVYNELTKVKYVTEGMRKPAFLSGEQKKAIVDLLFKTNRKVTVKQLKEDYFKKIECFDSVEISGVEDRFNASLGTYHDLLKIIKDKDFLDNEENEDILEDIVLTLTLFEDREMIEERLKTYAHLFDDKVMKQLKRRRYTGWGRLSRKLINGIRDKQSGKTILDFLKSDGFANRNFMQLIHDDSLTFKEDIQKAQVSGQGDSLHEHIANLAGSPAIKKGILQTVKVVDELVKVMGRHKPENIVIEMARENQTTQKGQKNSRERMKRIEEGIKELGSQILKEHPVENTQLQNEKLYLYYLQNGRDMYVDQELDINRLSDYDVDHIVPQSFLKDDSIDNKVLTRSDKNRGKSDNVPSEEVVKKMKNYWRQLLNAKLITQRKFDNLTKAERGGLSELDKAGFIKRQLVETRQITKHVAQILDSRMNTKYDENDKLIREVKVITLKSKLVSDFRKDFQFYKVREINNYHHAHDAYLNAVVGTALIKKYPKLESEFVYGDYKVYDVRKMIAKSEQEIGKATAKYFFYSNIMNFFKTEITLANGEIRKRPLIETNGETGEIVWDKGRDFATVRKVLSMPQVNIVKKTEVQTGGFSKESILPKRNSDKLIARKKDWDPKKYGGFDSPTVAYSVLVVAKVEKGKSKKLKSVKELLGITIMERSSFEKNPIDFLEAKGYKEVKKDLIIKLPKYSLFELENGRKRMLASAGELQKGNELALPSKYVNFLYLASHYEKLKGSPEDNEQKQLFVEQHKHYLDEIIEQISEFSKRVILADANLDKVLSAYNKHRDKPIREQAENIIHLFTLTNLGAPAAFKYFDTTIDRKRYTSTKEVLDATLIHQSITGLYETRIDLSQLGGD

SEQ ID NO: 285 - protein, 1545 aa, synthetic construct
  REGION 1..1545: note = 114 N-term single TadA helixtrunc 165-end delta 59-65 polypeptide sequence
MSEVEFSHEYWMRHALTLAKRARDEREVPVGAVLVLNNRVIGEGWNRTAHAEIMALRQGGLVMQNYRLIDATLYVTFEPCVMCAGAMIHSRIGRVVFGVRNAKTGAAGSLMDVLHYPGMNHRVEITEGILADECAALLCYFFRMPRSGGSSGGSSGSETPGTSESATPESSGGSSGGSDKKYSIGLAIGTNSVGWAVITDEYKVPSKKFKVLGNTDRHSIKKNLIGALLFDSGETAEATRLKRTARRRYTRRKNRICYLQEIFSNEMAKVDDSFFHRLEESFLVEEDKKHERHPIFGNIVDEVAYHEKYPTIYHLRKKLVDSTDKADLRLIYLALAHMIKFRGHFLIEGDLNPDNSDVDKLFIQLVQTYNQLFEENPINASGVDAKAILSARLSKSRRLENLIAQLPGEKKNGLFGNLIALSLGLTPNFKSNFDLAEDAKLQLSKDTYDDDLDNLLAQIGDQYADLFLAAKNLSDAILLSDILRVNTEITKAPLSASMIKRYDEHHQDLTLLKALVRQQLPEKYKEIFFDQSKNGYAGYIDGGASQEEFYKFIKPILEKMDGTEELLVKLNREDLLRKQRTFDNGSIPHQIHLGELHAILRRQEDFYPFLKDNREKIEKILTFRIPYYVGPLARGNSRFAWMTRKSEETITPWNFEEVVDKGASAQSFIERMTNFDKNLPNEKVLPKHSLLYEYFTVYNELTKVKYVTEGMRKPAFLSGEQKKAIVDLLFKTNRKVTVKQLKEDYFKKIECFDSVEISGVEDRFNASLGTYHDLLKIIKDKDFLDNEENEDILEDIVLTLTLFEDREMIEERLKTYAHLFDDKVMKQLKRRRYTGWGRLSRKLINGIRDKQSGKTILDFLKSDGFANRNFMQLIHDDSLTFKEDIQKAQVSGQGDSLHEHIANLAGSPAIKKGILQTVKVVDELVKVMGRHKPENIVIEMARENQTTQKGQKNSRERMKRIEEGIKELGSQILKEHPVENTQLQNEKLYLYYLQNGRDMYVDQELDINRLSDYDVDHIVPQSFLKDDSIDNKVLTRSDKNRGKSDNVPSEEVVKKMKNYWRQLLNAKLITQRKFDNLTKAERGGLSELDKAGFIKRQLVETRQITKHVAQILDSRMNTKYDENDKLIREVKVITLKSKLVSDFRKDFQFYKVREINNYHHAHDAYLNAVVGTALIKKYPKLESEFVYGDYKVYDVRKMIAKSEQEIGKATAKYFFYSNIMNFFKTEITLANGEIRKRPLIETNGETGEIVWDKGRDFATVRKVLSMPQVNIVKKTEVQTGGFSKESILPKRNSDKLIARKKDWDPKKYGGFDSPTVAYSVLVVAKVEKGKSKKLKSVKELLGITIMERSSFEKNPIDFLEAKGYKEVKKDLIIKLPKYSLFELENGRKRMLASAGELQKGNELALPSKYVNFLYLASHYEKLKGSPEDNEQKQLFVEQHKHYLDEIIEQISEFSKRVILADANLDKVLSAYNKHRDKPIREQAENIIHLFTLTNLGAPAAFKYFDTTIDRKRYTSTKEVLDATLIHQSITGLYETRIDLSQLGGD

SEQ ID NO: 286 - protein, 1541 aa, synthetic construct
  REGION 1..1541: note = 115.1 Cas9 TadAins 1004 polypeptide sequence
MDKKYSIGLAIGTNSVGWAVITDEYKVPSKKFKVLGNTDRHSIKKNLIGALLFDSGETAEATRLKRTARRRYTRRKNRICYLQEIFSNEMAKVDDSFFHRLEESFLVEEDKKHERHPIFGNIVDEVAYHEKYPTIYHLRKKLVDSTDKADLRLIYLALAHMIKFRGHFLIEGDLNPDNSDVDKLFIQLVQTYNQLFEENPINASGVDAKAILSARLSKSRRLENLIAQLPGEKKNGLFGNLIALSLGLTPNFKSNFDLAEDAKLQLSKDTYDDDLDNLLAQIGDQYADLFLAAKNLSDAILLSDILRVNTEITKAPLSASMIKRYDEHHQDLTLLKALVRQQLPEKYKEIFFDQSKNGYAGYIDGGASQEEFYKFIKPILEKMDGTEELLVKLNREDLLRKQRTFDNGSIPHQIHLGELHAILRRQEDFYPFLKDNREKIEKILTFRIPYYVGPLARGNSRFAWMTRKSEETITPWNFEEVVDKGASAQSFIERMTNFDKNLPNEKVLPKHSLLYEYFTVYNELTKVKYVTEGMRKPAFLSGEQKKAIVDLLFKTNRKVTVKQLKEDYFKKIECFDSVEISGVEDRFNASLGTYHDLLKIIKDKDFLDNEENEDILEDIVLTLTLFEDREMIEERLKTYAHLFDDKVMKQLKRRRYTGWGRLSRKLINGIRDKQSGKTILDFLKSDGFANRNFMQLIHDDSLTFKEDIQKAQVSGQGDSLHEHIANLAGSPAIKKGILQTVKVVDELVKVMGRHKPENIVIEMARENQTTQKGQKNSRERMKRIEEGIKELGSQILKEHPVENTQLQNEKLYLYYLQNGRDMYVDQELDINRLSDYDVDHIVPQSFLKDDSIDNKVLTRSDKNRGKSDNVPSEEVVKKMKNYWRQLLNAKLITQRKFDNLTKAERGGLSELDKAGFIKRQLVETRQITKHVAQILDSRMNTKYDENDKLIREVKVITLKSKLVSDFRKDFQFYKVREINNYHHAHDAYLNAVVGTALIKKYPKGSSGSETPGTSESATPESSGSEVEFSHEYWMRHALTLAKRARDEREVPVGAVLVLNNRVIGEGWNRAIGLHDPTAHAEIMALRQGGLVMQNYRLIDATLYVTFEPCVMCAGAMIHSRIGRVVFGVRNAKTGAAGSLMDVLHYPGMNHRVEITEGILADECAALLCYFFRMPRQLESEFVYGDYKVYDVRKMIAKSEQEIGKATAKYFFYSNIMNFFKTEITLANGEIRKRPLIETNGETGEIVWDKGRDFATVRKVLSMPQVNIVKKTEVQTGGFSKESILPKRNSDKLIARKKDWDPKKYGGFDSPTVAYSVLVVAKVEKGKSKKLKSVKELLGITIMERSSFEKNPIDFLEAKGYKEVKKDLIIKLPKYSLFELENGRKRMLASAGELQKGNELALPSKYVNFLYLASHYEKLKGSPEDNEQKQLFVEQHKHYLDEIIEQISEFSKRVILADANLDKVLSAYNKHRDKPIREQAENIIHLFTLTNLGAPAAFKYFDTTIDRKRYTSTKEVLDATLIHQSITGLYETRIDLSQLGGD

SEQ ID NO: 287 - protein, 1541 aa, synthetic construct
  REGION 1..1541: note = 115.2 Cas9 TadAins 1005 polypeptide sequence
MDKKYSIGLAIGTNSVGWAVITDEYKVPSKKFKVLGNTDRHSIKKNLIGALLFDSGETAEATRLKRTARRRYTRRKNRICYLQEIFSNEMAKVDDSFFHRLEESFLVEEDKKHERHPIFGNIVDEVAYHEKYPTIYHLRKKLVDSTDKADLRLIYLALAHMIKFRGHFLIEGDLNPDNSDVDKLFIQLVQTYNQLFEENPINASGVDAKAILSARLSKSRRLENLIAQLPGEKKNGLFGNLIALSLGLTPNFKSNFDLAEDAKLQLSKDTYDDDLDNLLAQIGDQYADLFLAAKNLSDAILLSDILRVNTEITKAPLSASMIKRYDEHHQDLTLLKALVRQQLPEKYKEIFFDQSKNGYAGYIDGGASQEEFYKFIKPILEKMDGTEELLVKLNREDLLRKQRTFDNGSIPHQIHLGELHAILRRQEDFYPFLKDNREKIEKILTFRIPYYVGPLARGNSRFAWMTRKSEETITPWNFEEVVDKGASAQSFIERMTNFDKNLPNEKVLPKHSLLYEYFTVYNELTKVKYVTEGMRKPAFLSGEQKKAIVDLLFKTNRKVTVKQLKEDYFKKIECFDSVEISGVEDRFNASLGTYHDLLKIIKDKDFLDNEENEDILEDIVLTLTLFEDREMIEERLKTYAHLFDDKVMKQLKRRRYTGWGRLSRKLINGIRDKQSGKTILDFLKSDGFANRNFMQLIHDDSLTFKEDIQKAQVSGQGDSLHEHIANLAGSPAIKKGILQTVKVVDELVKVMGRHKPENIVIEMARENQTTQKGQKNSRERMKRIEEGIKELGSQILKEHPVENTQLQNEKLYLYYLQNGRDMYVDQELDINRLSDYDVDHIVPQSFLKDDSIDNKVLTRSDKNRGKSDNVPSEEVVKKMKNYWRQLLNAKLITQRKFDNLTKAERGGLSELDKAGFIKRQLVETRQITKHVAQILDSRMNTKYDENDKLIREVKVITLKSKLVSDFRKDFQFYKVREINNYHHAHDAYLNAVVGTALIKKYPKLGSSGSETPGTSESATPESSGSEVEFSHEYWMRHALTLAKRARDEREVPVGAVLVLNNRVIGEGWNRAIGLHDPTAHAEIMALRQGGLVMQNYRLIDATLYVTFEPCVMCAGAMIHSRIGRVVFGVRNAKTGAAGSLMDVLHYPGMNHRVEITEGILADECAALLCYFFRMPRQESEFVYGDYKVYDVRKMIAKSEQEIGKATAKYFFYSNIMNFFKTEITLANGEIRKRPLIETNGETGEIVWDKGRDFATVRKVLSMPQVNIVKKTEVQTGGFSKESILPKRNSDKLIARKKDWDPKKYGGFDSPTVAYSVLVVAKVEKGKSKKLKSVKELLGITIMERSSFEKNPIDFLEAKGYKEVKKDLIIKLPKYSLFELENGRKRMLASAGELQKGNELALPSKYVNFLYLASHYEKLKGSPEDNEQKQLFVEQHKHYLDEIIEQISEFSKRVILADANLDKVLSAYNKHRDKPIREQAENIIHLFTLTNLGAPAAFKYFDTTIDRKRYTSTKEVLDATLIHQSITGLYETRIDLSQLGGD

SEQ ID NO: 288 - protein, 1541 aa, synthetic construct
  REGION 1..1541: note = 115.3 Cas9 TadAins 1006 polypeptide sequence
MDKKYSIGLAIGTNSVGWAVITDEYKVPSKKFKVLGNTDRHSIKKNLIGALLFDSGETAEATRLKRTARRRYTRRKNRICYLQEIFSNEMAKVDDSFFHRLEESFLVEEDKKHERHPIFGNIVDEVAYHEKYPTIYHLRKKLVDSTDKADLRLIYLALAHMIKFRGHFLIEGDLNPDNSDVDKLFIQLVQTYNQLFEENPINASGVDAKAILSARLSKSRRLENLIAQLPGEKKNGLFGNLIALSLGLTPNFKSNFDLAEDAKLQLSKDTYDDDLDNLLAQIGDQYADLFLAAKNLSDAILLSDILRVNTEITKAPLSASMIKRYDEHHQDLTLLKALVRQQLPEKYKEIFFDQSKNGYAGYIDGGASQEEFYKFIKPILEKMDGTEELLVKLNREDLLRKQRTFDNGSIPHQIHLGELHAILRRQEDFYPFLKDNREKIEKILTFRIPYYVGPLARGNSRFAWMTRKSEETITPWNFEEVVDKGASAQSFIERMTNFDKNLPNEKVLPKHSLLYEYFTVYNELTKVKYVTEGMRKPAFLSGEQKKAIVDLLFKTNRKVTVKQLKEDYFKKIECFDSVEISGVEDRFNASLGTYHDLLKIIKDKDFLDNEENEDILEDIVLTLTLFEDREMIEERLKTYAHLFDDKVMKQLKRRRYTGWGRLSRKLINGIRDKQSGKTILDFLKSDGFANRNFMQLIHDDSLTFKEDIQKAQVSGQGDSLHEHIANLAGSPAIKKGILQTVKVVDELVKVMGRHKPENIVIEMARENQTTQKGQKNSRERMKRIEEGIKELGSQILKEHPVENTQLQNEKLYLYYLQNGRDMYVDQELDINRLSDYDVDHIVPQSFLKDDSIDNKVLTRSDKNRGKSDNVPSEEVVKKMKNYWRQLLNAKLITQRKFDNLTKAERGGLSELDKAGFIKRQLVETRQITKHVAQILDSRMNTKYDENDKLIREVKVITLKSKLVSDFRKDFQFYKVREINNYHHAHDAYLNAVVGTALIKKYPKLEGSSGSETPGTSESATPESSGSEVEFSHEYWMRHALTLAKRARDEREVPVGAVLVLNNRVIGEGWNRAIGLHDPTAHAEIMALRQGGLVMQNYRLIDATLYVTFEPCVMCAGAMIHSRIGRVVFGVRNAKTGAAGSLMDVLHYPGMNHRVEITEGILADECAALLCYFFRMPRQSEFVYGDYKVYDVRKMIAKSEQEIGKATAKYFFYSNIMNFFKTEITLANGEIRKRPLIETNGETGEIVWDKGRDFATVRKVLSMPQVNIVKKTEVQTGGFSKESILPKRNSDKLIARKKDWDPKKYGGFDSPTVAYSVLVVAKVEKGKSKKLKSVKELLGITIMERSSFEKNPIDFLEAKGYKEVKKDLIIKLPKYSLFELENGRKRMLASAGELQKGNELALPSKYVNFLYLASHYEKLKGSPEDNEQKQLFVEQHKHYLDEIIEQISEFSKRVILADANLDKVLSAYNKHRDKPIREQAENIIHLFTLTNLGAPAAFKYFDTTIDRKRYTSTKEVLDATLIHQSITGLYETRIDLSQLGGD

SEQ ID NO: 289 - protein, 1541 aa, synthetic construct
  REGION 1..1541: note = 115.4 Cas9 TadAins 1007 polypeptide sequence
MDKKYSIGLAIGTNSVGWAVITDEYKVPSKKFKVLGNTDRHSIKKNLIGALLFDSGETAEATRLKRTARRRYTRRKNRICYLQEIFSNEMAKVDDSFFHRLEESFLVEEDKKHERHPIFGNIVDEVAYHEKYPTIYHLRKKLVDSTDKADLRLIYLALAHMIKFRGHFLIEGDLNPDNSDVDKLFIQLVQTYNQLFEENPINASGVDAKAILSARLSKSRRLENLIAQLPGEKKNGLFGNLIALSLGLTPNFKSNFDLAEDAKLQLSKDTYDDDLDNLLAQIGDQYADLFLAAKNLSDAILLSDILRVNTEITKAPLSASMIKRYDEHHQDLTLLKALVRQQLPEKYKEIFFDQSKNGYAGYIDGGASQEEFYKFIKPILEKMDGTEELLVKLNREDLLRKQRTFDNGSIPHQIHLGELHAILRRQEDFYPFLKDNREKIEKILTFRIPYYVGPLARGNSRFAWMTRKSEETITPWNFEEVVDKGASAQSFIERMTNFDKNLPNEKVLPKHSLLYEYFTVYNELTKVKYVTEGMRKPAFLSGEQKKAIVDLLFKTNRKVTVKQLKEDYFKKIECFDSVEISGVEDRFNASLGTYHDLLKIIKDKDFLDNEENEDILEDIVLTLTLFEDREMIEERLKTYAHLFDDKVMKQLKRRRYTGWGRLSRKLINGIRDKQSGKTILDFLKSDGFANRNFMQLIHDDSLTFKEDIQKAQVSGQGDSLHEHIANLAGSPAIKKGILQTVKVVDELVKVMGRHKPENIVIEMARENQTTQKGQKNSRERMKRIEEGIKELGSQILKEHPVENTQLQNEKLYLYYLQNGRDMYVDQELDINRLSDYDVDHIVPQSFLKDDSIDNKVLTRSDKNRGKSDNVPSEEVVKKMKNYWRQLLNAKLITQRKFDNLTKAERGGLSELDKAGFIKRQLVETRQITKHVAQILDSRMNTKYDENDKLIREVKVITLKSKLVSDFRKDFQFYKVREINNYHHAHDAYLNAVVGTALIKKYPKLESGSSGSETPGTSESATPESSGSEVEFSHEYWMRHALTLAKRARDEREVPVGAVLVLNNRVIGEGWNRAIGLHDPTAHAEIMALRQGGLVMQNYRLIDATLYVTFEPCVMCAGAMIHSRIGRVVFGVRNAKTGAAGSLMDVLHYPGMNHRVEITEGILADECAALLCYFFRMPRQEFVYGDYKVYDVRKMIAKSEQEIGKATAKYFFYSNIMNFFKTEITLANGEIRKRPLIETNGETGEIVWDKGRDFATVRKVLSMPQVNIVKKTEVQTGGFSKESILPKRNSDKLIARKKDWDPKKYGGFDSPTVAYSVLVVAKVEKGKSKKLKSVKELLGITIMERSSFEKNPIDFLEAKGYKEVKKDLIIKLPKYSLFELENGRKRMLASAGELQKGNELALPSKYVNFLYLASHYEKLKGSPEDNEQKQLFVEQHKHYLDEIIEQISEFSKRVILADANLDKVLSAYNKHRDKPIREQAENIIHLFTLTNLGAPAAFKYFDTTIDRKRYTSTKEVLDATLIHQSITGLYETRIDLSQLGGD

SEQ ID NO: 290 - protein, 1541 aa, synthetic construct
  REGION 1..1541: note = 116.1 Cas9 TadAins C-term truncate 792 polypeptide sequence
MDKKYSIGLAIGTNSVGWAVITDEYKVPSKKFKVLGNTDRHSIKKNLIGALLFDSGETAEATRLKRTARRRYTRRKNRICYLQEIFSNEMAKVDDSFFHRLEESFLVEEDKKHERHPIFGNIVDEVAYHEKYPTIYHLRKKLVDSTDKADLRLIYLALAHMIKFRGHFLIEGDLNPDNSDVDKLFIQLVQTYNQLFEENPINASGVDAKAILSARLSKSRRLENLIAQLPGEKKNGLFGNLIALSLGLTPNFKSNFDLAEDAKLQLSKDTYDDDLDNLLAQIGDQYADLFLAAKNLSDAILLSDILRVNTEITKAPLSASMIKRYDEHHQDLTLLKALVRQQLPEKYKEIFFDQSKNGYAGYIDGGASQEEFYKFIKPILEKMDGTEELLVKLNREDLLRKQRTFDNGSIPHQIHLGELHAILRRQEDFYPFLKDNREKIEKILTFRIPYYVGPLARGNSRFAWMTRKSEETITPWNFEEVVDKGASAQSFIERMTNFDKNLPNEKVLPKHSLLYEYFTVYNELTKVKYVTEGMRKPAFLSGEQKKAIVDLLFKTNRKVTVKQLKEDYFKKIECFDSVEISGVEDRFNASLGTYHDLLKIIKDKDFLDNEENEDILEDIVLTLTLFEDREMIEERLKTYAHLFDDKVMKQLKRRRYTGWGRLSRKLINGIRDKQSGKTILDFLKSDGFANRNFMQLIHDDSLTFKEDIQKAQVSGQGDSLHEHIANLAGSPAIKKGILQTVKVVDELVKVMGRHKPENIVIEMARENQTTQKGQKNSRERMKRIEEGIKELGGSSGSETPGTSESATPESSGSEVEFSHEYWMRHALTLAKRARDEREVPVGAVLVLNNRVIGEGWNRAIGLHDPTAHAEIMALRQGGLVMQNYRLIDATLYVTFEPCVMCAGAMIHSRIGRVVFGVRNAKTGAAGSLMDVLHYPGMNHRVEITEGILADECAALLCYFFRMPRQSQILKEHPVENTQLQNEKLYLYYLQNGRDMYVDQELDINRLSDYDVDHIVPQSFLKDDSIDNKVLTRSDKNRGKSDNVPSEEVVKKMKNYWRQLLNAKLITQRKFDNLTKAERGGLSELDKAGFIKRQLVETRQITKHVAQILDSRMNTKYDENDKLIREVKVITLKSKLVSDFRKDFQFYKVREINNYHHAHDAYLNAVVGTALIKKYPKLESEFVYGDYKVYDVRKMIAKSEQEIGKATAKYFFYSNIMNFFKTEITLANGEIRKRPLIETNGETGEIVWDKGRDFATVRKVLSMPQVNIVKKTEVQTGGFSKESILPKRNSDKLIARKKDWDPKKYGGFDSPTVAYSVLVVAKVEKGKSKKLKSVKELLGITIMERSSFEKNPIDFLEAKGYKEVKKDLIIKLPKYSLFELENGRKRMLASAGELQKGNELALPSKYVNFLYLASHYEKLKGSPEDNEQKQLFVEQHKHYLDEIIEQISEFSKRVILADANLDKVLSAYNKHRDKPIREQAENIIHLFTLTNLGAPAAFKYFDTTIDRKRYTSTKEVLDATLIHQSITGLYETRIDLSQLGGD

SEQ ID NO: 291 - protein, 1541 aa, synthetic construct
  REGION 1..1541: note = 116.2 Cas9 TadAins C-term truncate 791 polypeptide sequence
MDKKYSIGLAIGTNSVGWAVITDEYKVPSKKFKVLGNTDRHSIKKNLIGALLFDSGETAEATRLKRTARRRYTRRKNRICYLQEIFSNEMAKVDDSFFHRLEESFLVEEDKKHERHPIFGNIVDEVAYHEKYPTIYHLRKKLVDSTDKADLRLIYLALAHMIKFRGHFLIEGDLNPDNSDVDKLFIQLVQTYNQLFEENPINASGVDAKAILSARLSKSRRLENLIAQLPGEKKNGLFGNLIALSLGLTPNFKSNFDLAEDAKLQLSKDTYDDDLDNLLAQIGDQYADLFLAAKNLSDAILLSDILRVNTEITKAPLSASMIKRYDEHHQDLTLLKALVRQQLPEKYKEIFFDQSKNGYAGYIDGGASQEEFYKFIKPILEKMDGTEELLVKLNREDLLRKQRTFDNGSIPHQIHLGELHAILRRQEDFYPFLKDNREKIEKILTFRIPYYVGPLARGNSRFAWMTRKSEETITPWNFEEVVDKGASAQSFIERMTNFDKNLPNEKVLPKHSLLYEYFTVYNELTKVKYVTEGMRKPAFLSGEQKKAIVDLLFKTNRKVTVKQLKEDYFKKIECFDSVEISGVEDRFNASLGTYHDLLKIIKDKDFLDNEENEDILEDIVLTLTLFEDREMIEERLKTYAHLFDDKVMKQLKRRRYTGWGRLSRKLINGIRDKQSGKTILDFLKSDGFANRNFMQLIHDDSLTFKEDIQKAQVSGQGDSLHEHIANLAGSPAIKKGILQTVKVVDELVKVMGRHKPENIVIEMARENQTTQKGQKNSRERMKRIEEGIKELGSSGSETPGTSESATPESSGSEVEFSHEYWMRHALTLAKRARDEREVPVGAVLVLNNRVIGEGWNRAIGLHDPTAHAEIMALRQGGLVMQNYRLIDATLYVTFEPCVMCAGAMIHSRIGRVVFGVRNAKTGAAGSLMDVLHYPGMNHRVEITEGILADECAALLCYFFRMPRQGSQILKEHPVENTQLQNEKLYLYYLQNGRDMYVDQELDINRLSDYDVDHIVPQSFLKDDSIDNKVLTRSDKNRGKSDNVPSEEVVKKMKNYWRQLLNAKLITQRKFDNLTKAERGGLSELDKAGFIKRQLVETRQITKHVAQILDSRMNTKYDENDKLIREVKVITLKSKLVSDFRKDFQFYKVREINNYHHAHDAYLNAVVGTALIKKYPKLESEFVYGDYKVYDVRKMIAKSEQEIGKATAKYFFYSNIMNFFKTEITLANGEIRKRPLIETNGETGEIVWDKGRDFATVRKVLSMPQVNIVKKTEVQTGGFSKESILPKRNSDKLIARKKDWDPKKYGGFDSPTVAYSVLVVAKVEKGKSKKLKSVKELLGITIMERSSFEKNPIDFLEAKGYKEVKKDLIIKLPKYSLFELENGRKRMLASAGELQKGNELALPSKYVNFLYLASHYEKLKGSPEDNEQKQLFVEQHKHYLDEIIEQISEFSKRVILADANLDKVLSAYNKHRDKPIREQAENIIHLFTLTNLGAPAAFKYFDTTIDRKRYTSTKEVLDATLIHQSITGLYETRIDLSQLGGD

SEQ ID NO: 292 - protein, 1541 aa, synthetic construct
  REGION 1..1541: note = 116.3 Cas9 TadAins C-term truncate 790 polypeptide sequence
MDKKYSIGLAIGTNSVGWAVITDEYKVPSKKFKVLGNTDRHSIKKNLIGALLFDSGETAEATRLKRTARRRYTRRKNRICYLQEIFSNEMAKVDDSFFHRLEESFLVEEDKKHERHPIFGNIVDEVAYHEKYPTIYHLRKKLVDSTDKADLRLIYLALAHMIKFRGHFLIEGDLNPDNSDVDKLFIQLVQTYNQLFEENPINASGVDAKAILSARLSKSRRLENLIAQLPGEKKNGLFGNLIALSLGLTPNFKSNFDLAEDAKLQLSKDTYDDDLDNLLAQIGDQYADLFLAAKNLSDAILLSDILRVNTEITKAPLSASMIKRYDEHHQDLTLLKALVRQQLPEKYKEIFFDQSKNGYAGYIDGGASQEEFYKFIKPILEKMDGTEELLVKLNREDLLRKQRTFDNGSIPHQIHLGELHAILRRQEDFYPFLKDNREKIEKILTFRIPYYVGPLARGNSRFAWMTRKSEETITPWNFEEVVDKGASAQSFIERMTNFDKNLPNEKVLPKHSLLYEYFTVYNELTKVKYVTEGMRKPAFLSGEQKKAIVDLLFKTNRKVTVKQLKEDYFKKIECFDSVEISGVEDRFNASLGTYHDLLKIIKDKDFLDNEENEDILEDIVLTLTLFEDREMIEERLKTYAHLFDDKVMKQLKRRRYTGWGRLSRKLINGIRDKQSGKTILDFLKSDGFANRNFMQLIHDDSLTFKEDIQKAQVSGQGDSLHEHIANLAGSPAIKKGILQTVKVVDELVKVMGRHKPENIVIEMARENQTTQKGQKNSRERMKRIEEGIKEGSSGSETPGTSESATPESSGSEVEFSHEYWMRHALTLAKRARDEREVPVGAVLVLNNRVIGEGWNRAIGLHDPTAHAEIMALRQGGLVMQNYRLIDATLYVTFEPCVMCAGAMIHSRIGRVVFGVRNAKTGAAGSLMDVLHYPGMNHRVEITEGILADECAALLCYFFRMPRQLGSQILKEHPVENTQLQNEKLYLYYLQNGRDMYVDQELDINRLSDYDVDHIVPQSFLKDDSIDNKVLTRSDKNRGKSDNVPSEEVVKKMKNYWRQLLNAKLITQRKFDNLTKAERGGLSELDKAGFIKRQLVETRQITKHVAQILDSRMNTKYDENDKLIREVKVITLKSKLVSDFRKDFQFYKVREINNYHHAHDAYLNAVVGTALIKKYPKLESEFVYGDYKVYDVRKMIAKSEQEIGKATAKYFFYSNIMNFFKTEITLANGEIRKRPLIETNGETGEIVWDKGRDFATVRKVLSMPQVNIVKKTEVQTGGFSKESILPKRNSDKLIARKKDWDPKKYGGFDSPTVAYSVLVVAKVEKGKSKKLKSVKELLGITIMERSSFEKNPIDFLEAKGYKEVKKDLIIKLPKYSLFELENGRKRMLASAGELQKGNELALPSKYVNFLYLASHYEKLKGSPEDNEQKQLFVEQHKHYLDEIIEQISEFSKRVILADANLDKVLSAYNKHRDKPIREQAENIIHLFTLTNLGAPAAFKYFDTTIDRKRYTSTKEVLDATLIHQSITGLYETRIDLSQLGGD

SEQ ID NO: 293 - protein, 1484 aa, synthetic construct
  REGION 1..1484: note = 117 Cas9 delta 1017-1069 polypeptide sequence
MDKKYSIGLAIGTNSVGWAVITDEYKVPSKKFKVLGNTDRHSIKKNLIGALLFDSGETAEATRLKRTARRRYTRRKNRICYLQEIFSNEMAKVDDSFFHRLEESFLVEEDKKHERHPIFGNIVDEVAYHEKYPTIYHLRKKLVDSTDKADLRLIYLALAHMIKFRGHFLIEGDLNPDNSDVDKLFIQLVQTYNQLFEENPINASGVDAKAILSARLSKSRRLENLIAQLPGEKKNGLFGNLIALSLGLTPNFKSNFDLAEDAKLQLSKDTYDDDLDNLLAQIGDQYADLFLAAKNLSDAILLSDILRVNTEITKAPLSASMIKRYDEHHQDLTLLKALVRQQLPEKYKEIFFDQSKNGYAGYIDGGASQEEFYKFIKPILEKMDGTEELLVKLNREDLLRKQRTFDNGSIPHQIHLGELHAILRRQEDFYPFLKDNREKIEKILTFRIPYYVGPLARGNSRFAWMTRKSEETITPWNFEEVVDKGASAQSFIERMTNFDKNLPNEKVLPKHSLLYEYFTVYNELTKVKYVTEGMRKPAFLSGEQKKAIVDLLFKTNRKVTVKQLKEDYFKKIECFDSVEISGVEDRFNASLGTYHDLLKIIKDKDFLDNEENEDILEDIVLTLTLFEDREMIEERLKTYAHLFDDKVMKQLKRRRYTGWGRLSRKLINGIRDKQSGKTILDFLKSDGFANRNFMQLIHDDSLTFKEDIQKAQVSGQGDSLHEHIANLAGSPAIKKGILQTVKVVDELVKVMGRHKPENIVIEMARENQTTQKGQKNSRERMKRIEEGIKELGSQILKEHPVENTQLQNEKLYLYYLQNGRDMYVDQELDINRLSDYDVDHIVPQSFLKDDSIDNKVLTRSDKNRGKSDNVPSEEVVKKMKNYWRQLLNAKLITQRKFDNLTKAERGGLSELDKAGFIKRQLVETRQITKHVAQILDSRMNTKYDENDKLIREVKVITLKSKLVSDFRKDFQFYKVREINNYHHAHDAYLNAVVGTALIKKYPKLESEFVYGDYKVYSSGSEVEFSHEYWMRHALTLAKRARDEREVPVGAVLVLNNRVIGEGWNRAIGLHDPTAHAEIMALRQGGLVMQNYRLIDATLYVTFEPCVMCAGAMIHSRIGRVVFGVRNAKTGAAGSLMDVLHYPGMNHRVEITEGILADECAALLCYFFRMPRQVFNAQKKAQSSTDGEIVWDKGRDFATVRKVLSMPQVNIVKKTEVQTGGFSKESILPKRNSDKLIARKKDWDPKKYGGFDSPTVAYSVLVVAKVEKGKSKKLKSVKELLGITIMERSSFEKNPIDFLEAKGYKEVKKDLIIKLPKYSLFELENGRKRMLASAGELQKGNELALPSKYVNFLYLASHYEKLKGSPEDNEQKQLFVEQHKHYLDEIIEQISEFSKRVILADANLDKVLSAYNKHRDKPIREQAENIIHLFTLTNLGAPAAFKYFDTTIDRKRYTSTKEVLDATLIHQSITGLYETRIDLSQLGGD

SEQ ID NO: 294 - protein, 1554 aa, synthetic construct
  REGION 1..1554: note = 118 Cas9 TadA-CP116ins 1067 polypeptide sequence
MDKKYSIGLAIGTNSVGWAVITDEYKVPSKKFKVLGNTDRHSIKKNLIGALLFDSGETAEATRLKRTARRRYTRRKNRICYLQEIFSNEMAKVDDSFFHRLEESFLVEEDKKHERHPIFGNIVDEVAYHEKYPTIYHLRKKLVDSTDKADLRLIYLALAHMIKFRGHFLIEGDLNPDNSDVDKLFIQLVQTYNQLFEENPINASGVDAKAILSARLSKSRRLENLIAQLPGEKKNGLFGNLIALSLGLTPNFKSNFDLAEDAKLQLSKDTYDDDLDNLLAQIGDQYADLFLAAKNLSDAILLSDILRVNTEITKAPLSASMIKRYDEHHQDLTLLKALVRQQLPEKYKEIFFDQSKNGYAGYIDGGASQEEFYKFIKPILEKMDGTEELLVKLNREDLLRKQRTFDNGSIPHQIHLGELHAILRRQEDFYPFLKDNREKIEKILTFRIPYYVGPLARGNSRFAWMTRKSEETITPWNFEEVVDKGASAQSFIERMTNFDKNLPNEKVLPKHSLLYEYFTVYNELTKVKYVTEGMRKPAFLSGEQKKAIVDLLFKTNRKVTVKQLKEDYFKKIECFDSVEISGVEDRFNASLGTYHDLLKIIKDKDFLDNEENEDILEDIVLTLTLFEDREMIEERLKTYAHLFDDKVMKQLKRRRYTGWGRLSRKLINGIRDKQSGKTILDFLKSDGFANRNFMQLIHDDSLTFKEDIQKAQVSGQGDSLHEHIANLAGSPAIKKGILQTVKVVDELVKVMGRHKPENIVIEMARENQTTQKGQKNSRERMKRIEEGIKELGSQILKEHPVENTQLQNEKLYLYYLQNGRDMYVDQELDINRLSDYDVDHIVPQSFLKDDSIDNKVLTRSDKNRGKSDNVPSEEVVKKMKNYWRQLLNAKLITQRKFDNLTKAERGGLSELDKAGFIKRQLVETRQITKHVAQILDSRMNTKYDENDKLIREVKVITLKSKLVSDFRKDFQFYKVREINNYHHAHDAYLNAVVGTALIKKYPKLESEFVYGDYKVYDVRKMIAKSEQEIGKATAKYFFYSNIMNFFKTEITLANGEIRKRPLIETNMNHRVEITEGILADECAALLCYFFRMPRQVFNAQKKAQSSTDGSSGSETPGTSESATPESSGSEVEFSHEYWMRHALTLAKRARDEREVPVGAVLVLNNRVIGEGWNRAIGLHDPTAHAEIMALRQGGLVMQNYRLIDATLYVTFEPCVMCAGAMIHSRIGRVVFGVRNAKTGAAGSLMDVLHYPGGETGEIVWDKGRDFATVRKVLSMPQVNIVKKTEVQTGGFSKESILPKRNSDKLIARKKDWDPKKYGGFDSPTVAYSVLVVAKVEKGKSKKLKSVKELLGITIMERSSFEKNPIDFLEAKGYKEVKKDLIIKLPKYSLFELENGRKRMLASAGELQKGNELALPSKYVNFLYLASHYEKLKGSPEDNEQKQLFVEQHKHYLDEIIEQISEFSKRVILADANLDKVLSAYNKHRDKPIREQAENIIHLFTLTNLGAPAAFKYFDTTIDRKRYTSTKEVLDATLIHQSITGLYETRIDLSQLGGD

SEQ ID NO: 295 - protein, 1554 aa, synthetic construct
  REGION 1..1554: note = 119 Cas9 TadAins 701 polypeptide sequence
MDKKYSIGLAIGTNSVGWAVITDEYKVPSKKFKVLGNTDRHSIKKNLIGALLFDSGETAEATRLKRTARRRYTRRKNRICYLQEIFSNEMAKVDDSFFHRLEESFLVEEDKKHERHPIFGNIVDEVAYHEKYPTIYHLRKKLVDSTDKADLRLIYLALAHMIKFRGHFLIEGDLNPDNSDVDKLFIQLVQTYNQLFEENPINASGVDAKAILSARLSKSRRLENLIAQLPGEKKNGLFGNLIALSLGLTPNFKSNFDLAEDAKLQLSKDTYDDDLDNLLAQIGDQYADLFLAAKNLSDAILLSDILRVNTEITKAPLSASMIKRYDEHHQDLTLLKALVRQQLPEKYKEIFFDQSKNGYAGYIDGGASQEEFYKFIKPILEKMDGTEELLVKLNREDLLRKQRTFDNGSIPHQIHLGELHAILRRQEDFYPFLKDNREKIEKILTFRIPYYVGPLARGNSRFAWMTRKSEETITPWNFEEVVDKGASAQSFIERMTNFDKNLPNEKVLPKHSLLYEYFTVYNELTKVKYVTEGMRKPAFLSGEQKKAIVDLLFKTNRKVTVKQLKEDYFKKIECFDSVEISGVEDRFNASLGTYHDLLKIIKDKDFLDNEENEDILEDIVLTLTLFEDREMIEERLKTYAHLFDDKVMKQLKRRRYTGWGRLSRKLINGIRDKQSGKTILDFLKSDGFANRNFMQLIHDDSGSSGSETPGTSESATPESSGSEVEFSHEYWMRHALTLAKRARDEREVPVGAVLVLNNRVIGEGWNRAIGLHDPTAHAEIMALRQGGLVMQNYRLIDATLYVTFEPCVMCAGAMIHSRIGRVVFGVRNAKTGAAGSLMDVLHYPGMNHRVEITEGILADECAALLCYFFRMPRQVFNAQKKAQSSTDLTFKEDIQKAQVSGQGDSLHEHIANLAGSPAIKKGILQTVKVVDELVKVMGRHKPENIVIEMARENQTTQKGQKNSRERMKRIEEGIKELGSQILKEHPVENTQLQNEKLYLYYLQNGRDMYVDQELDINRLSDYDVDHIVPQSFLKDDSIDNKVLTRSDKNRGKSDNVPSEEVVKKMKNYWRQLLNAKLITQRKFDNLTKAERGGLSELDKAGFIKRQLVETRQITKHVAQILDSRMNTKYDENDKLIREVKVITLKSKLVSDFRKDFQFYKVREINNYHHAHDAYLNAVVGTALIKKYPKLESEFVYGDYKVYDVRKMIAKSEQEIGKATAKYFFYSNIMNFFKTEITLANGEIRKRPLIETNGETGEIVWDKGRDFATVRKVLSMPQVNIVKKTEVQTGGFSKESILPKRNSDKLIARKKDWDPKKYGGFDSPTVAYSVLVVAKVEKGKSKKLKSVKELLGITIMERSSFEKNPIDFLEAKGYKEVKKDLIIKLPKYSLFELENGRKRMLASAGELQKGNELALPSKYVNFLYLASHYEKLKGSPEDNEQKQLFVEQHKHYLDEIIEQISEFSKRVILADANLDKVLSAYNKHRDKPIREQAENIIHLFTLTNLGAPAAFKYFDTTIDRKRYTSTKEVLDATLIHQSITGLYETRIDLSQLGGD

SEQ ID NO: 296 - protein, 1554 aa, synthetic construct
  REGION 1..1554: note = 120 Cas9 TadACP136ins 1248 polypeptide sequence
MDKKYSIGLAIGTNSVGWAVITDEYKVPSKKFKVLGNTDRHSIKKNLIGALLFDSGETAEATRLKRTARRRYTRRKNRICYLQEIFSNEMAKVDDSFFHRLEESFLVEEDKKHERHPIFGNIVDEVAYHEKYPTIYHLRKKLVDSTDKADLRLIYLALAHMIKFRGHFLIEGDLNPDNSDVDKLFIQLVQTYNQLFEENPINASGVDAKAILSARLSKSRRLENLIAQLPGEKKNGLFGNLIALSLGLTPNFKSNFDLAEDAKLQLSKDTYDDDLDNLLAQIGDQYADLFLAAKNLSDAILLSDILRVNTEITKAPLSASMIKRYDEHHQDLTLLKALVRQQLPEKYKEIFFDQSKNGYAGYIDGGASQEEFYKFIKPILEKMDGTEELLVKLNREDLLRKQRTFDNGSIPHQIHLGELHAILRRQEDFYPFLKDNREKIEKILTFRIPYYVGPLARGNSRFAWMTRKSEETITPWNFEEVVDKGASAQSFIERMTNFDKNLPNEKVLPKHSLLYEYFTVYNELTKVKYVTEGMRKPAFLSGEQKKAIVDLLFKTNRKVTVKQLKEDYFKKIECFDSVEISGVEDRFNASLGTYHDLLKIIKDKDFLDNEENEDILEDIVLTLTLFEDREMIEERLKTYAHLFDDKVMKQLKRRRYTGWGRLSRKLINGIRDKQSGKTILDFLKSDGFANRNFMQLIHDDSLTFKEDIQKAQVSGQGDSLHEHIANLAGSPAIKKGILQTVKVVDELVKVMGRHKPENIVIEMARENQTTQKGQKNSRERMKRIEEGIKELGSQILKEHPVENTQLQNEKLYLYYLQNGRDMYVDQELDINRLSDYDVDHIVPQSFLKDDSIDNKVLTRSDKNRGKSDNVPSEEVVKKMKNYWRQLLNAKLITQRKFDNLTKAERGGLSELDKAGFIKRQLVETRQITKHVAQILDSRMNTKYDENDKLIREVKVITLKSKLVSDFRKDFQFYKVREINNYHHAHDAYLNAVVGTALIKKYPKLESEFVYGDYKVYDVRKMIAKSEQEIGKATAKYFFYSNIMNFFKTEITLANGEIRKRPLIETNGETGEIVWDKGRDFATVRKVLSMPQVNIVKKTEVQTGGFSKESILPKRNSDKLIARKKDWDPKKYGGFDSPTVAYSVLVVAKVEKGKSKKLKSVKELLGITIMERSSFEKNPIDFLEAKGYKEVKKDLIIKLPKYSLFELENGRKRMLASAGELQKGNELALPSKYVNFLYLASHYEKLKGSMNHRVEITEGILADECAALLCYFFRMPRQVFNAQKKAQSSTDGSSGSETPGTSESATPESSGSEVEFSHEYWMRHALTLAKRARDEREVPVGAVLVLNNRVIGEGWNRAIGLHDPTAHAEIMALRQGGLVMQNYRLIDATLYVTFEPCVMCAGAMIHSRIGRVVFGVRNAKTGAAGSLMDVLHYPGPEDNEQKQLFVEQHKHYLDEIIEQISEFSKRVILADANLDKVLSAYNKHRDKPIREQAENIIHLFTLTNLGAPAAFKYFDTTIDRKRYTSTKEVLDATLIHQSITGLYETRIDLSQLGGD

SEQ ID NO: 297 - protein, 1554 aa, synthetic construct
  REGION 1..1554: note = 121 Cas9 TadACP136ins 1052 polypeptide sequence
MDKKYSIGLAIGTNSVGWAVITDEYKVPSKKFKVLGNTDRHSIKKNLIGALLFDSGETAEATRLKRTARRRYTRRKNRICYLQEIFSNEMAKVDDSFFHRLEESFLVEEDKKHERHPIFGNIVDEVAYHEKYPTIYHLRKKLVDSTDKADLRLIYLALAHMIKFRGHFLIEGDLNPDNSDVDKLFIQLVQTYNQLFEENPINASGVDAKAILSARLSKSRRLENLIAQLPGEKKNGLFGNLIALSLGLTPNFKSNFDLAEDAKLQLSKDTYDDDLDNLLAQIGDQYADLFLAAKNLSDAILLSDILRVNTEITKAPLSASMIKRYDEHHQDLTLLKALVRQQLPEKYKEIFFDQSKNGYAGYIDGGASQEEFYKFIKPILEKMDGTEELLVKLNREDLLRKQRTFDNGSIPHQIHLGELHAILRRQEDFYPFLKDNREKIEKILTFRIPYYVGPLARGNSRFAWMTRKSEETITPWNFEEVVDKGASAQSFIERMTNFDKNLPNEKVLPKHSLLYEYFTVYNELTKVKYVTEGMRKPAFLSGEQKKAIVDLLFKTNRKVTVKQLKEDYFKKIECFDSVEISGVEDRFNASLGTYHDLLKIIKDKDFLDNEENEDILEDIVLTLTLFEDREMIEERLKTYAHLFDDKVMKQLKRRRYTGWGRLSRKLINGIRDKQSGKTILDFLKSDGFANRNFMQLIHDDSLTFKEDIQKAQVSGQGDSLHEHIANLAGSPAIKKGILQTVKVVDELVKVMGRHKPENIVIEMARENQTTQKGQKNSRERMKRIEEGIKELGSQILKEHPVENTQLQNEKLYLYYLQNGRDMYVDQELDINRLSDYDVDHIVPQSFLKDDSIDNKVLTRSDKNRGKSDNVPSEEVVKKMKNYWRQLLNAKLITQRKFDNLTKAERGGLSELDKAGFIKRQLVETRQITKHVAQILDSRMNTKYDENDKLIREVKVITLKSKLVSDFRKDFQFYKVREINNYHHAHDAYLNAVVGTALIKKYPKLESEFVYGDYKVYDVRKMIAKSEQEIGKATAKYFFYSNIMNFFKTEITLAMNHRVEITEGILADECAALLCYFFRMPRQVFNAQKKAQSSTDGSSGSETPGTSESATPESSGSEVEFSHEYWMRHALTLAKRARDEREVPVGAVLVLNNRVIGEGWNRAIGLHDPTAHAEIMALRQGGLVMQNYRLIDATLYVTFEPCVMCAGAMIHSRIGRVVFGVRNAKTGAAGSLMDVLHYPGNGEIRKRPLIETNGETGEIVWDKGRDFATVRKVLSMPQVNIVKKTEVQTGGFSKESILPKRNSDKLIARKKDWDPKKYGGFDSPTVAYSVLVVAKVEKGKSKKLKSVKELLGITIMERSSFEKNPIDFLEAKGYKEVKKDLIIKLPKYSLFELENGRKRMLASAGELQKGNELALPSKYVNFLYLASHYEKLKGSPEDNEQKQLFVEQHKHYLDEIIEQISEFSKRVILADANLDKVLSAYNKHRDKPIREQAENIIHLFTLTNLGAPAAFKYFDTTIDRKRYTSTKEVLDATLIHQSITGLYETRIDLSQLGGD

SEQ ID NO: 298 - protein, 1554 aa, synthetic construct
  REGION 1..1554: note = 122 Cas9 TadACP136ins 1041 polypeptide sequence
MDKKYSIGLAIGTNSVGWAVITDEYKVPSKKFKVLGNTDRHSIKKNLIGALLFDSGETAEATRLKRTARRRYTRRKNRICYLQEIFSNEMAKVDDSFFHRLEESFLVEEDKKHERHPIFGNIVDEVAYHEKYPTIYHLRKKLVDSTDKADLRLIYLALAHMIKFRGHFLIEGDLNPDNSDVDKLFIQLVQTYNQLFEENPINASGVDAKAILSARLSKSRRLENLIAQLPGEKKNGLFGNLIALSLGLTPNFKSNFDLAEDAKLQLSKDTYDDDLDNLLAQIGDQYADLFLAAKNLSDAILLSDILRVNTEITKAPLSASMIKRYDEHHQDLTLLKALVRQQLPEKYKEIFFDQSKNGYAGYIDGGASQEEFYKFIKPILEKMDGTEELLVKLNREDLLRKQRTFDNGSIPHQIHLGELHAILRRQEDFYPFLKDNREKIEKILTFRIPYYVGPLARGNSRFAWMTRKSEETITPWNFEEVVDKGASAQSFIERMTNFDKNLPNEKVLPKHSLLYEYFTVYNELTKVKYVTEGMRKPAFLSGEQKKAIVDLLFKTNRKVTVKQLKEDYFKKIECFDSVEISGVEDRFNASLGTYHDLLKIIKDKDFLDNEENEDILEDIVLTLTLFEDREMIEERLKTYAHLFDDKVMKQLKRRRYTGWGRLSRKLINGIRDKQSGKTILDFLKSDGFANRNFMQLIHDDSLTFKEDIQKAQVSGQGDSLHEHIANLAGSPAIKKGILQTVKVVDELVKVMGRHKPENIVIEMARENQTTQKGQKNSRERMKRIEEGIKELGSQILKEHPVENTQLQNEKLYLYYLQNGRDMYVDQELDINRLSDYDVDHIVPQSFLKDDSIDNKVLTRSDKNRGKSDNVPSEEVVKKMKNYWRQLLNAKLITQRKFDNLTKAERGGLSELDKAGFIKRQLVETRQITKHVAQILDSRMNTKYDENDKLIREVKVITLKSKLVSDFRKDFQFYKVREINNYHHAHDAYLNAVVGTALIKKYPKLESEFVYGDYKVYDVRKMIAKSEQEIGKATAKYFFYSMNHRVEITEGILADECAALLCYFFRMPRQVFNAQKKAQSSTDGSSGSETPGTSESATPESSGSEVEFSHEYWMRHALTLAKRARDEREVPVGAVLVLNNRVIGEGWNRAIGLHDPTAHAEIMALRQGGLVMQNYRLIDATLYVTFEPCVMCAGAMIHSRIGRVVFGVRNAKTGAAGSLMDVLHYPGNIMNFFKTEITLANGEIRKRPLIETNGETGEIVWDKGRDFATVRKVLSMPQVNIVKKTEVQTGGFSKESILPKRNSDKLIARKKDWDPKKYGGFDSPTVAYSVLVVAKVEKGKSKKLKSVKELLGITIMERSSFEKNPIDFLEAKGYKEVKKDLIIKLPKYSLFELENGRKRMLASAGELQKGNELALPSKYVNFLYLASHYEKLKGSPEDNEQKQLFVEQHKHYLDEIIEQISEFSKRVILADANLDKVLSAYNKHRDKPIREQAENIIHLFTLTNLGAPAAFKYFDTTIDRKRYTSTKEVLDATLIHQSITGLYETRIDLSQLGGD

SEQ ID NO: 299 - protein, 1554 aa, synthetic construct
  REGION 1..1554: note = 123 Cas9 TadACP139ins 1299 polypeptide sequence
MDKKYSIGLAIGTNSVGWAVITDEYKVPSKKFKVLGNTDRHSIKKNLIGALLFDSGETAEATRLKRTARRRYTRRKNRICYLQEIFSNEMAKVDDSFFHRLEESFLVEEDKKHERHPIFGNIVDEVAYHEKYPTIYHLRKKLVDSTDKADLRLIYLALAHMIKFRGHFLIEGDLNPDNSDVDKLFIQLVQTYNQLFEENPINASGVDAKAILSARLSKSRRLENLIAQLPGEKKNGLFGNLIALSLGLTPNFKSNFDLAEDAKLQLSKDTYDDDLDNLLAQIGDQYADLFLAAKNLSDAILLSDILRVNTEITKAPLSASMIKRYDEHHQDLTLLKALVRQQLPEKYKEIFFDQSKNGYAGYIDGGASQEEFYKFIKPILEKMDGTEELLVKLNREDLLRKQRTFDNGSIPHQIHLGELHAILRRQEDFYPFLKDNREKIEKILTFRIPYYVGPLARGNSRFAWMTRKSEETITPWNFEEVVDKGASAQSFIERMTNFDKNLPNEKVLPKHSLLYEYFTVYNELTKVKYVTEGMRKPAFLSGEQKKAIVDLLFKTNRKVTVKQLKEDYFKKIECFDSVEISGVEDRFNASLGTYHDLLKIIKDKDFLDNEENEDILEDIVLTLTLFEDREMIEERLKTYAHLFDDKVMKQLKRRRYTGWGRLSRKLINGIRDKQSGKTILDFLKSDGFANRNFMQLIHDDSLTFKEDIQKAQVSGQGDSLHEHIANLAGSPAIKKGILQTVKVVDELVKVMGRHKPENIVIEMARENQTTQKGQKNSRERMKRIEEGIKELGSQILKEHPVENTQLQNEKLYLYYLQNGRDMYVDQELDINRLSDYDVDHIVPQSFLKDDSIDNKVLTRSDKNRGKSDNVPSEEVVKKMKNYWRQLLNAKLITQRKFDNLTKAERGGLSELDKAGFIKRQLVETRQITKHVAQILDSRMNTKYDENDKLIREVKVITLKSKLVSDFRKDFQFYKVREINNYHHAHDAYLNAVVGTALIKKYPKLESEFVYGDYKVYDVRKMIAKSEQEIGKATAKYFFYSNIMNFFKTEITLANGEIRKRPLIETNGETGEIVWDKGRDFATVRKVLSMPQVNIVKKTEVQTGGFSKESILPKRNSDKLIARKKDWDPKKYGGFDSPTVAYSVLVVAKVEKGKSKKLKSVKELLGITIMERSSFEKNPIDFLEAKGYKEVKKDLIIKLPKYSLFELENGRKRMLASAGELQKGNELALPSKYVNFLYLASHYEKLKGSPEDNEQKQLFVEQHKHYLDEIIEQISEFSKRVILADANLDKVLSAYNKHRMNHRVEITEGILADECAALLCYFFRMPRQVFNAQKKAQSSTDGSSGSETPGTSESATPESSGSEVEFSHEYWMRHALTLAKRARDEREVPVGAVLVLNNRVIGEGWNRAIGLHDPTAHAEIMALRQGGLVMQNYRLIDATLYVTFEPCVMCAGAMIHSRIGRVVFGVRNAKTGAAGSLMDVLHYPGDKPIREQAENIIHLFTLTNLGAPAAFKYFDTTIDRKRYTSTKEVLDATLIHQSITGLYETRIDLSQLGGD

SEQ ID NO: 300 - protein, 1454 aa, synthetic construct
  REGION 1..1454: note = 124 Cas9 delta 792-872TadAins polypeptide sequence
MDKKYSIGLAIGTNSVGWAVITDEYKVPSKKFKVLGNTDRHSIKKNLIGALLFDSGETAEATRLKRTARRRYTRRKNRICYLQEIFSNEMAKVDDSFFHRLEESFLVEEDKKHERHPIFGNIVDEVAYHEKYPTIYHLRKKLVDSTDKADLRLIYLALAHMIKFRGHFLIEGDLNPDNSDVDKLFIQLVQTYNQLFEENPINASGVDAKAILSARLSKSRRLENLIAQLPGEKKNGLFGNLIALSLGLTPNFKSNFDLAEDAKLQLSKDTYDDDLDNLLAQIGDQYADLFLAAKNLSDAILLSDILRVNTEITKAPLSASMIKRYDEHHQDLTLLKALVRQQLPEKYKEIFFDQSKNGYAGYIDGGASQEEFYKFIKPILEKMDGTEELLVKLNREDLLRKQRTFDNGSIPHQIHLGELHAILRRQEDFYPFLKDNREKIEKILTFRIPYYVGPLARGNSRFAWMTRKSEETITPWNFEEVVDKGASAQSFIERMTNFDKNLPNEKVLPKHSLLYEYFTVYNELTKVKYVTEGMRKPAFLSGEQKKAIVDLLFKTNRKVTVKQLKEDYFKKIECFDSVEISGVEDRFNASLGTYHDLLKIIKDKDFLDNEENEDILEDIVLTLTLFEDREMIEERLKTYAHLFDDKVMKQLKRRRYTGWGRLSRKLINGIRDKQSGKTILDFLKSDGFANRNFMQLIHDDSLTFKEDIQKAQVSGQGDSLHEHIANLAGSPAIKKGILQTVKVVDELVKVMGRHKPENIVIEMARENQTTQKGQKNSRERMKRIEEGIKELGSEVEFSHEYWMRHALTLAKRARDEREVPVGAVLVLNNRVIGEGWNRAIGLHDPTAHAEIMALRQGGLVMQNYRLIDATLYVTFEPCVMCAGAMIHSRIGRVVFGVRNAKTGAAGSLMDVLHYPGMNHRVEITEGILADECAALLCYFFRMPRQVFNAQKKAQSSTDEEVVKKMKNYWRQLLNAKLITQRKFDNLTKAERGGLSELDKAGFIKRQLVETRQITKHVAQILDSRMNTKYDENDKLIREVKVITLKSKLVSDFRKDFQFYKVREINNYHHAHDAYLNAVVGTALIKKYPKLESEFVYGDYKVYDVRKMIAKSEQEIGKATAKYFFYSNIMNFFKTEITLANGEIRKRPLIETNGETGEIVWDKGRDFATVRKVLSMPQVNIVKKTEVQTGGFSKESILPKRNSDKLIARKKDWDPKKYGGFDSPTVAYSVLVVAKVEKGKSKKLKSVKELLGITIMERSSFEKNPIDFLEAKGYKEVKKDLIIKLPKYSLFELENGRKRMLASAGELQKGNELALPSKYVNFLYLASHYEKLKGSPEDNEQKQLFVEQHKHYLDEIIEQISEFSKRVILADANLDKVLSAYNKHRDKPIREQAENIIHLFTLTNLGAPAAFKYFDTTIDRKRYTSTKEVLDATLIHQSITGLYETRIDLSQLGGD

SEQ ID NO: 301 - protein, 1420 aa, synthetic construct
  REGION 1..1420: note = 125 Cas9 delta 792-906TadAins polypeptide sequence
MDKKYSIGLAIGTNSVGWAVITDEYKVPSKKFKVLGNTDRHSIKKNLIGALLFDSGETAEATRLKRTARRRYTRRKNRICYLQEIFSNEMAKVDDSFFHRLEESFLVEEDKKHERHPIFGNIVDEVAYHEKYPTIYHLRKKLVDSTDKADLRLIYLALAHMIKFRGHFLIEGDLNPDNSDVDKLFIQLVQTYNQLFEENPINASGVDAKAILSARLSKSRRLENLIAQLPGEKKNGLFGNLIALSLGLTPNFKSNFDLAEDAKLQLSKDTYDDDLDNLLAQIGDQYADLFLAAKNLSDAILLSDILRVNTEITKAPLSASMIKRYDEHHQDLTLLKALVRQQLPEKYKEIFFDQSKNGYAGYIDGGASQEEFYKFIKPILEKMDGTEELLVKLNREDLLRKQRTFDNGSIPHQIHLGELHAILRRQEDFYPFLKDNREKIEKILTFRIPYYVGPLARGNSRFAWMTRKSEETITPWNFEEVVDKGASAQSFIERMTNFDKNLPNEKVLPKHSLLYEYFTVYNELTKVKYVTEGMRKPAFLSGEQKKAIVDLLFKTNRKVTVKQLKEDYFKKIECFDSVEISGVEDRFNASLGTYHDLLKIIKDKDFLDNEENEDILEDIVLTLTLFEDREMIEERLKTYAHLFDDKVMKQLKRRRYTGWGRLSRKLINGIRDKQSGKTILDFLKSDGFANRNFMQLIHDDSLTFKEDIQKAQVSGQGDSLHEHIANLAGSPAIKKGILQTVKVVDELVKVMGRHKPENIVIEMARENQTTQKGQKNSRERMKRIEEGIKELGSEVEFSHEYWMRHALTLAKRARDEREVPVGAVLVLNNRVIGEGWNRAIGLHDPTAHAEIMALRQGGLVMQNYRLIDATLYVTFEPCVMCAGAMIHSRIGRVVFGVRNAKTGAAGSLMDVLHYPGMNHRVEITEGILADECAALLCYFFRMPRQVFNAQKKAQSSTDGLSELDKAGFIKRQLVETRQITKHVAQILDSRMNTKYDENDKLIREVKVITLKSKLVSDFRKDFQFYKVREINNYHHAHDAYLNAVVGTALIKKYPKLESEFVYGDYKVYDVRKMIAKSEQEIGKATAKYFFYSNIMNFFKTEITLANGEIRKRPLIETNGETGEIVWDKGRDFATVRKVLSMPQVNIVKKTEVQTGGFSKESILPKRNSDKLIARKKDWDPKKYGGFDSPTVAYSVLVVAKVEKGKSKKLKSVKELLGITIMERSSFEKNPIDFLEAKGYKEVKKDLIIKLPKYSLFELENGRKRMLASAGELQKGNELALPSKYVNFLYLASHYEKLKGSPEDNEQKQLFVEQHKHYLDEIIEQISEFSKRVILADANLDKVLSAYNKHRDKPIREQAENIIHLFTLTNLGAPAAFKYFDTTIDRKRYTSTKEVLDATLIHQSITGLYETRIDLSQLGGD

SEQ ID NO: 302 - protein, 1554 aa, synthetic construct
  REGION 1..1554: note = 126 TadA CP65ins 1003 polypeptide sequence
MDKKYSIGLAIGTNSVGWAVITDEYKVPSKKFKVLGNTDRHSIKKNLIGALLFDSGETAEATRLKRTARRRYTRRKNRICYLQEIFSNEMAKVDDSFFHRLEESFLVEEDKKHERHPIFGNIVDEVAYHEKYPTIYHLRKKLVDSTDKADLRLIYLALAHMIKFRGHFLIEGDLNPDNSDVDKLFIQLVQTYNQLFEENPINASGVDAKAILSARLSKSRRLENLIAQLPGEKKNGLFGNLIALSLGLTPNFKSNFDLAEDAKLQLSKDTYDDDLDNLLAQIGDQYADLFLAAKNLSDAILLSDILRVNTEITKAPLSASMIKRYDEHHQDLTLLKALVRQQLPEKYKEIFFDQSKNGYAGYIDGGASQEEFYKFIKPILEKMDGTEELLVKLNREDLLRKQRTFDNGSIPHQIHLGELHAILRRQEDFYPFLKDNREKIEKILTFRIPYYVGPLARGNSRFAWMTRKSEETITPWNFEEVVDKGASAQSFIERMTNFDKNLPNEKVLPKHSLLYEYFTVYNELTKVKYVTEGMRKPAFLSGEQKKAIVDLLFKTNRKVTVKQLKEDYFKKIECFDSVEISGVEDRFNASLGTYHDLLKIIKDKDFLDNEENEDILEDIVLTLTLFEDREMIEERLKTYAHLFDDKVMKQLKRRRYTGWGRLSRKLINGIRDKQSGKTILDFLKSDGFANRNFMQLIHDDSLTFKEDIQKAQVSGQGDSLHEHIANLAGSPAIKKGILQTVKVVDELVKVMGRHKPENIVIEMARENQTTQKGQKNSRERMKRIEEGIKELGSQILKEHPVENTQLQNEKLYLYYLQNGRDMYVDQELDINRLSDYDVDHIVPQSFLKDDSIDNKVLTRSDKNRGKSDNVPSEEVVKKMKNYWRQLLNAKLITQRKFDNLTKAERGGLSELDKAGFIKRQLVETRQITKHVAQILDSRMNTKYDENDKLIREVKVITLKSKLVSDFRKDFQFYKVREINNYHHAHDAYLNAVVGTALIKKYPKTAHAEIMALRQGGLVMQNYRLIDATLYVTFEPCVMCAGAMIHSRIGRVVFGVRNAKTGAAGSLMDVLHYPGMNHRVEITEGILADECAALLCYFFRMPRQVFNAQKKAQSSTDGSSGSETPGTSESATPESSGSEVEFSHEYWMRHALTLAKRARDEREVPVGAVLVLNNRVIGEGWNRAIGLHDPLESEFVYGDYKVYDVRKMIAKSEQEIGKATAKYFFYSNIMNFFKTEITLANGEIRKRPLIETNGETGEIVWDKGRDFATVRKVLSMPQVNIVKKTEVQTGGFSKESILPKRNSDKLIARKKDWDPKKYGGFDSPTVAYSVLVVAKVEKGKSKKLKSVKELLGITIMERSSFEKNPIDFLEAKGYKEVKKDLIIKLPKYSLFELENGRKRMLASAGELQKGNELALPSKYVNFLYLASHYEKLKGSPEDNEQKQLFVEQHKHYLDEIIEQISEFSKRVILADANLDKVLSAYNKHRDKPIREQAENIIHLFTLTNLGAPAAFKYFDTTIDRKRYTSTKEVLDATLIHQSITGLYETRIDLSQLGGD

SEQ ID NO: 303 - protein, 1554 aa, synthetic construct
  REGION 1..1554: note = 127 TadA CP65ins 1016 polypeptide sequence
MDKKYSIGLAIGTNSVGWAVITDEYKVPSKKFKVLGNTDRHSIKKNLIGALLFDSGETAEATRLKRTARRRYTRRKNRICYLQEIFSNEMAKVDDSFFHRLEESFLVEEDKKHERHPIFGNIVDEVAYHEKYPTIYHLRKKLVDSTDKADLRLIYLALAHMIKFRGHFLIEGDLNPDNSDVDKLFIQLVQTYNQLFEENPINASGVDAKAILSARLSKSRRLENLIAQLPGEKKNGLFGNLIALSLGLTPNFKSNFDLAEDAKLQLSKDTYDDDLDNLLAQIGDQYADLFLAAKNLSDAILLSDILRVNTEITKAPLSASMIKRYDEHHQDLTLLKALVRQQLPEKYKEIFFDQSKNGYAGYIDGGASQEEFYKFIKPILEKMDGTEELLVKLNREDLLRKQRTFDNGSIPHQIHLGELHAILRRQEDFYPFLKDNREKIEKILTFRIPYYVGPLARGNSRFAWMTRKSEETITPWNFEEVVDKGASAQSFIERMTNFDKNLPNEKVLPKHSLLYEYFTVYNELTKVKYVTEGMRKPAFLSGEQKKAIVDLLFKTNRKVTVKQLKEDYFKKIECFDSVEISGVEDRFNASLGTYHDLLKIIKDKDFLDNEENEDILEDIVLTLTLFEDREMIEERLKTYAHLFDDKVMKQLKRRRYTGWGRLSRKLINGIRDKQSGKTILDFLKSDGFANRNFMQLIHDDSLTFKEDIQKAQVSGQGDSLHEHIANLAGSPAIKKGILQTVKVVDELVKVMGRHKPENIVIEMARENQTTQKGQKNSRERMKRIEEGIKELGSQILKEHPVENTQLQNEKLYLYYLQNGRDMYVDQELDINRLSDYDVDHIVPQSFLKDDSIDNKVLTRSDKNRGKSDNVPSEEVVKKMKNYWRQLLNAKLITQRKFDNLTKAERGGLSELDKAGFIKRQLVETRQITKHVAQILDSRMNTKYDENDKLIREVKVITLKSKLVSDFRKDFQFYKVREINNYHHAHDAYLNAVVGTALIKKYPKLESEFVYGDYKVTAHAEIMALRQGGLVMQNYRLIDATLYVTFEPCVMCAGAMIHSRIGRVVFGVRNAKTGAAGSLMDVLHYPGMNHRVEITEGILADECAALLCYFFRMPRQVFNAQKKAQSSTDGSSGSETPGTSESATPESSGSEVEFSHEYWMRHALTLAKRARDEREVPVGAVLVLNNRVIGEGWNRAIGLHDPYDVRKMIAKSEQEIGKATAKYFFYSNIMNFFKTEITLANGEIRKRPLIETNGETGEIVWDKGRDFATVRKVLSMPQVNIVKKTEVQTGGFSKESILPKRNSDKLIARKKDWDPKKYGGFDSPTVAYSVLVVAKVEKGKSKKLKSVKELLGITIMERSSFEKNPIDFLEAKGYKEVKKDLIIKLPKYSLFELENGRKRMLASAGELQKGNELALPSKYVNFLYLASHYEKLKGSPEDNEQKQLFVEQHKHYLDEIIEQISEFSKRVILADANLDKVLSAYNKHRDKPIREQAENIIHLFTLTNLGAPAAFKYFDTTIDRKRYTSTKEVLDATLIHQSITGLYETRIDLSQLGGD

SEQ ID NO: 304 - protein, 1554 aa, synthetic construct
  REGION 1..1554: note = 128 TadA CP65ins 1022 polypeptide sequence
MDKKYSIGLAIGTNSVGWAVITDEYKVPSKKFKVLGNTDRHSIKKNLIGALLFDSGETAEATRLKRTARRRYTRRKNRICYLQEIFSNEMAKVDDSFFHRLEESFLVEEDKKHERHPIFGNIVDEVAYHEKYPTIYHLRKKLVDSTDKADLRLIYLALAHMIKFRGHFLIEGDLNPDNSDVDKLFIQLVQTYNQLFEENPINASGVDAKAILSARLSKSRRLENLIAQLPGEKKNGLFGNLIALSLGLTPNFKSNFDLAEDAKLQLSKDTYDDDLDNLLAQIGDQYADLFLAAKNLSDAILLSDILRVNTEITKAPLSASMIKRYDEHHQDLTLLKALVRQQLPEKYKEIFFDQSKNGYAGYIDGGASQEEFYKFIKPILEKMDGTEELLVKLNREDLLRKQRTFDNGSIPHQIHLGELHAILRRQEDFYPFLKDNREKIEKILTFRIPYYVGPLARGNSRFAWMTRKSEETITPWNFEEVVDKGASAQSFIERMTNFDKNLPNEKVLPKHSLLYEYFTVYNELTKVKYVTEGMRKPAFLSGEQKKAIVDLLFKTNRKVTVKQLKEDYFKKIECFDSVEISGVEDRFNASLGTYHDLLKIIKDKDFLDNEENEDILEDIVLTLTLFEDREMIEERLKTYAHLFDDKVMKQLKRRRYTGWGRLSRKLINGIRDKQSGKTILDFLKSDGFANRNFMQLIHDDSLTFKEDIQKAQVSGQGDSLHEHIANLAGSPAIKKGILQTVKVVDELVKVMGRHKPENIVIEMARENQTTQKGQKNSRERMKRIEEGIKELGSQILKEHPVENTQLQNEKLYLYYLQNGRDMYVDQELDINRLSDYDVDHIVPQSFLKDDSIDNKVLTRSDKNRGKSDNVPSEEVVKKMKNYWRQLLNAKLITQRKFDNLTKAERGGLSELDKAGFIKRQLVETRQITKHVAQILDSRMNTKYDENDKLIREVKVITLKSKLVSDFRKDFQFYKVREINNYHHAHDAYLNAVVGTALIKKYPKLESEFVYGDYKVYDVRKMITAHAEIMALRQGGLVMQNYRLIDATLYVTFEPCVMCAGAMIHSRIGRVVFGVRNAKTGAAGSLMDVLHYPGMNHRVEITEGILADECAALLCYFFRMPRQVFNAQKKAQSSTDGSSGSETPGTSESATPESSGSEVEFSHEYWMRHALTLAKRARDEREVPVGAVLVLNNRVIGEGWNRAIGLHDPAKSEQEIGKATAKYFFYSNIMNFFKTEITLANGEIRKRPLIETNGETGEIVWDKGRDFATVRKVLSMPQVNIVKKTEVQTGGFSKESILPKRNSDKLIARKKDWDPKKYGGFDSPTVAYSVLVVAKVEKGKSKKLKSVKELLGITIMERSSFEKNPIDFLEAKGYKEVKKDLIIKLPKYSLFELENGRKRMLASAGELQKGNELALPSKYVNFLYLASHYEKLKGSPEDNEQKQLFVEQHKHYLDEIIEQISEFSKRVILADANLDKVLSAYNKHRDKPIREQAENIIHLFTLTNLGAPAAFKYFDTTIDRKRYTSTKEVLDATLIHQSITGLYETRIDLSQLGGD

SEQ ID NO: 305 - protein, 1554 aa, synthetic construct
  REGION 1..1554: note = 129 TadA CP65ins 1029 polypeptide sequence
MDKKYSIGLAIGTNSVGWAVITDEYKVPSKKFKVLGNTDRHSIKKNLIGALLFDSGETAEATRLKRTARRRYTRRKNRICYLQEIFSNEMAKVDDSFFHRLEESFLVEEDKKHERHPIFGNIVDEVAYHEKYPTIYHLRKKLVDSTDKADLRLIYLALAHMIKFRGHFLIEGDLNPDNSDVDKLFIQLVQTYNQLFEENPINASGVDAKAILSARLSKSRRLENLIAQLPGEKKNGLFGNLIALSLGLTPNFKSNFDLAEDAKLQLSKDTYDDDLDNLLAQIGDQYADLFLAAKNLSDAILLSDILRVNTEITKAPLSASMIKRYDEHHQDLTLLKALVRQQLPEKYKEIFFDQSKNGYAGYIDGGASQEEFYKFIKPILEKMDGTEELLVKLNREDLLRKQRTFDNGSIPHQIHLGELHAILRRQEDFYPFLKDNREKIEKILTFRIPYYVGPLARGNSRFAWMTRKSEETITPWNFEEVVDKGASAQSFIERMTNFDKNLPNEKVLPKHSLLYEYFTVYNELTKVKYVTEGMRKPAFLSGEQKKAIVDLLFKTNRKVTVKQLKEDYFKKIECFDSVEISGVEDRFNASLGTYHDLLKIIKDKDFLDNEENEDILEDIVLTLTLFEDREMIEERLKTYAHLFDDKVMKQLKRRRYTGWGRLSRKLINGIRDKQSGKTILDFLKSDGFANRNFMQLIHDDSLTFKEDIQKAQVSGQGDSLHEHIANLAGSPAIKKGILQTVKVVDELVKVMGRHKPENIVIEMARENQTTQKGQKNSRERMKRIEEGIKELGSQILKEHPVENTQLQNEKLYLYYLQNGRDMYVDQELDINRLSDYDVDHIVPQSFLKDDSIDNKVLTRSDKNRGKSDNVPSEEVVKKMKNYWRQLLNAKLITQRKFDNLTKAERGGLSELDKAGFIKRQLVETRQITKHVAQILDSRMNTKYDENDKLIREVKVITLKSKLVSDFRKDFQFYKVREINNYHHAHDAYLNAVVGTALIKKYPKLESEFVYGDYKVYDVRKMIAKSEQEITAHAEIMALRQGGLVMQNYRLIDATLYVTFEPCVMCAGAMIHSRIGRVVFGVRNAKTGAAGSLMDVLHYPGMNHRVEITEGILADECAALLCYFFRMPRQVFNAQKKAQSSTDGSSGSETPGTSESATPESSGSEVEFSHEYWMRHALTLAKRARDEREVPVGAVLVLNNRVIGEGWNRAIGLHDPGKATAKYFFYSNIMNFFKTEITLANGEIRKRPLIETNGETGEIVWDKGRDFATVRKVLSMPQVNIVKKTEVQTGGFSKESILPKRNSDKLIARKKDWDPKKYGGFDSPTVAYSVLVVAKVEKGKSKKLKSVKELLGITIMERSSFEKNPIDFLEAKGYKEVKKDLIIKLPKYSLFELENGRKRMLASAGELQKGNELALPSKYVNFLYLASHYEKLKGSPEDNEQKQLFVEQHKHYLDEIIEQISEFSKRVILADANLDKVLSAYNKHRDKPIREQAENIIHLFTLTNLGAPAAFKYFDTTIDRKRYTSTKEVLDATLIHQSITGLYETRIDLSQLGGD

SEQ ID NO: 306 - protein, 1554 aa, synthetic construct
  REGION 1..1554: note = 130 TadA CP65ins 1041 polypeptide sequence
MDKKYSIGLAIGTNSVGWAVITDEYKVPSKKFKVLGNTDRHSIKKNLIGALLFDSGETAEATRLKRTARRRYTRRKNRICYLQEIFSNEMAKVDDSFFHRLEESFLVEEDKKHERHPIFGNIVDEVAYHEKYPTIYHLRKKLVDSTDKADLRLIYLALAHMIKFRGHFLIEGDLNPDNSDVDKLFIQLVQTYNQLFEENPINASGVDAKAILSARLSKSRRLENLIAQLPGEKKNGLFGNLIALSLGLTPNFKSNFDLAEDAKLQLSKDTYDDDLDNLLAQIGDQYADLFLAAKNLSDAILLSDILRVNTEITKAPLSASMIKRYDEHHQDLTLLKALVRQQLPEKYKEIFFDQSKNGYAGYIDGGASQEEFYKFIKPILEKMDGTEELLVKLNREDLLRKQRTFDNGSIPHQIHLGELHAILRRQEDFYPFLKDNREKIEKILTFRIPYYVGPLARGNSRFAWMTRKSEETITPWNFEEVVDKGASAQSFIERMTNFDKNLPNEKVLPKHSLLYEYFTVYNELTKVKYVTEGMRKPAFLSGEQKKAIVDLLFKTNRKVTVKQLKEDYFKKIECFDSVEISGVEDRFNASLGTYHDLLKIIKDKDFLDNEENEDILEDIVLTLTLFEDREMIEERLKTYAHLFDDKVMKQLKRRRYTGWGRLSRKLINGIRDKQSGKTILDFLKSDGFANRNFMQLIHDDSLTFKEDIQKAQVSGQGDSLHEHIANLAGSPAIKKGILQTVKVVDELVKVMGRHKPENIVIEMARENQTTQKGQKNSRERMKRIEEGIKELGSQILKEHPVENTQLQNEKLYLYYLQNGRDMYVDQELDINRLSDYDVDHIVPQSFLKDDSIDNKVLTRSDKNRGKSDNVPSEEVVKKMKNYWRQLLNAKLITQRKFDNLTKAERGGLSELDKAGFIKRQLVETRQITKHVAQILDSRMNTKYDENDKLIREVKVITLKSKLVSDFRKDFQFYKVREINNYHHAHDAYLNAVVGTALIKKYPKLESEFVYGDYKVYDVRKMIAKSEQEIGKATAKYFFYSTAHAEIMALRQGGLVMQNYRLIDATLYVTFEPCVMCAGAMIHSRIGRVVFGVRNAKTGAAGSLMDVLHYPGMNHRVEITEGILADECAALLCYFFRMPRQVFNAQKKAQSSTDGSSGSETPGTSESATPESSGSEVEFSHEYWMRHALTLAKRARDEREVPVGAVLVLNNRVIGEGWNRAIGLHDPNIMNFFKTEITLANGEIRKRPLIETNGETGEIVWDKGRDFATVRKVLSMPQVNIVKKTEVQTGGFSKESILPKRNSDKLIARKKDWDPKKYGGFDSPTVAYSVLVVAKVEKGKSKKLKSVKELLGITIMERSSFEKNPIDFLEAKGYKEVKKDLIIKLPKYSLFELENGRKRMLASAGELQKGNELALPSKYVNFLYLASHYEKLKGSPEDNEQKQLFVEQHKHYLDEIIEQISEFSKRVILADANLDKVLSAYNKHRDKPIREQAENIIHLFTLTNLGAPAAFKYFDTTIDRKRYTSTKEVLDATLIHQSITGLYETRIDLSQLGGD

SEQ ID NO: 307 - protein, 1554 aa, synthetic construct
  REGION 1..1554: note = 131 TadA CP65ins 1054 polypeptide sequence
MDKKYSIGLAIGTNSVGWAVITDEYKVPSKKFKVLGNTDRHSIKKNLIGALLFDSGETAEATRLKRTARRRYTRRKNRICYLQEIFSNEMAKVDDSFFHRLEESFLVEEDKKHERHPIFGNIVDEVAYHEKYPTIYHLRKKLVDSTDKADLRLIYLALAHMIKFRGHFLIEGDLNPDNSDVDKLFIQLVQTYNQLFEENPINASGVDAKAILSARLSKSRRLENLIAQLPGEKKNGLFGNLIALSLGLTPNFKSNFDLAEDAKLQLSKDTYDDDLDNLLAQIGDQYADLFLAAKNLSDAILLSDILRVNTEITKAPLSASMIKRYDEHHQDLTLLKALVRQQLPEKYKEIFFDQSKNGYAGYIDGGASQEEFYKFIKPILEKMDGTEELLVKLNREDLLRKQRTFDNGSIPHQIHLGELHAILRRQEDFYPFLKDNREKIEKILTFRIPYYVGPLARGNSRFAWMTRKSEETITPWNFEEVVDKGASAQSFIERMTNFDKNLPNEKVLPKHSLLYEYFTVYNELTKVKYVTEGMRKPAFLSGEQKKAIVDLLFKTNRKVTVKQLKEDYFKKIECFDSVEISGVEDRFNASLGTYHDLLKIIKDKDFLDNEENEDILEDIVLTLTLFEDREMIEERLKTYAHLFDDKVMKQLKRRRYTGWGRLSRKLINGIRDKQSGKTILDFLKSDGFANRNFMQLIHDDSLTFKEDIQKAQVSGQGDSLHEHIANLAGSPAIKKGILQTVKVVDELVKVMGRHKPENIVIEMARENQTTQKGQKNSRERMKRIEEGIKELGSQILKEHPVENTQLQNEKLYLYYLQNGRDMYVDQELDINRLSDYDVDHIVPQSFLKDDSIDNKVLTRSDKNRGKSDNVPSEEVVKKMKNYWRQLLNAKLITQRKFDNLTKAERGGLSELDKAGFIKRQLVETRQITKHVAQILDSRMNTKYDENDKLIREVKVITLKSKLVSDFRKDFQFYKVREINNYHHAHDAYLNAVVGTALIKKYPKLESEFVYGDYKVYDVRKMIAKSEQEIGKATAKYFFYSNIMNFFKTEITLANTAHAEIMALRQGGLVMQNYRLIDATLYVTFEPCVMCAGAMIHSRIGRVVFGVRNAKTGAAGSLMDVLHYPGMNHRVEITEGILADECAALLCYFFRMPRQVFNAQKKAQSSTDGSSGSETPGTSESATPESSGSEVEFSHEYWMRHALTLAKRARDEREVPVGAVLVLNNRVIGEGWNRAIGLHDPGEIRKRPLIETNGETGEIVWDKGRDFATVRKVLSMPQVNIVKKTEVQTGGFSKESILPKRNSDKLIARKKDWDPKKYGGFDSPTVAYSVLVVAKVEKGKSKKLKSVKELLGITIMERSSFEKNPIDFLEAKGYKEVKKDLIIKLPKYSLFELENGRKRMLASAGELQKGNELALPSKYVNFLYLASHYEKLKGSPEDNEQKQLFVEQHKHYLDEIIEQISEFSKRVILADANLDKVLSAYNKHRDKPIREQAENIIHLFTLTNLGAPAAFKYFDTTIDRKRYTSTKEVLDATLIHQSITGLYETRIDLSQLGGD

SEQ ID NO: 308 - protein, 1554 aa, synthetic construct
  REGION 1..1554: note = 132 TadA CP65ins 1246 polypeptide sequence
MDKKYSIGLAIGTNSVGWAVITDEYKVPSKKFKVLGNTDRHSIKKNLIGALLFDSGETAEATRLKRTARRRYTRRKNRICYLQEIFSNEMAKVDDSFFHRLEESFLVEEDKKHERHPIFGNIVDEVAYHEKYPTIYHLRKKLVDSTDKADLRLIYLALAHMIKFRGHFLIEGDLNPDNSDVDKLFIQLVQTYNQLFEENPINASGVDAKAILSARLSKSRRLENLIAQLPGEKKNGLFGNLIALSLGLTPNFKSNFDLAEDAKLQLSKDTYDDDLDNLLAQIGDQYADLFLAAKNLSDAILLSDILRVNTEITKAPLSASMIKRYDEHHQDLTLLKALVRQQLPEKYKEIFFDQSKNGYAGYIDGGASQEEFYKFIKPILEKMDGTEELLVKLNREDLLRKQRTFDNGSIPHQIHLGELHAILRRQEDFYPFLKDNREKIEKILTFRIPYYVGPLARGNSRFAWMTRKSEETITPWNFEEVVDKGASAQSFIERMTNFDKNLPNEKVLPKHSLLYEYFTVYNELTKVKYVTEGMRKPAFLSGEQKKAIVDLLFKTNRKVTVKQLKEDYFKKIECFDSVEISGVEDRFNASLGTYHDLLKIIKDKDFLDNEENEDILEDIVLTLTLFEDREMIEERLKTYAHLFDDKVMKQLKRRRYTGWGRLSRKLINGIRDKQSGKTILDFLKSDGFANRNFMQLIHDDSLTFKEDIQKAQVSGQGDSLHEHIANLAGSPAIKKGILQTVKVVDELVKVMGRHKPENIVIEMARENQTTQKGQKNSRERMKRIEEGIKELGSQILKEHPVENTQLQNEKLYLYYLQNGRDMYVDQELDINRLSDYDVDHIVPQSFLKDDSIDNKVLTRSDKNRGKSDNVPSEEVVKKMKNYWRQLLNAKLITQRKFDNLTKAERGGLSELDKAGFIKRQLVETRQITKHVAQILDSRMNTKYDENDKLIREVKVITLKSKLVSDFRKDFQFYKVREINNYHHAHDAYLNAVVGTALIKKYPKLESEFVYGDYKVYDVRKMIAKSEQEIGKATAKYFFYSNIMNFFKTEITLANGEIRKRPLIETNGETGEIVWDKGRDFATVRKVLSMPQVNIVKKTEVQTGGFSKESILPKRNSDKLIARKKDWDPKKYGGFDSPTVAYSVLVVAKVEKGKSKKLKSVKELLGITIMERSSFEKNPIDFLEAKGYKEVKKDLIIKLPKYSLFELENGRKRMLASAGELQKGNELALPSKYVNFLYLASHYEKLKGTAHAEIMALRQGGLVMQNYRLIDATLYVTFEPCVMCAGAMIHSRIGRVVFGVRNAKTGAAGSLMDVLHYPGMNHRVEITEGILADECAALLCYFFRMPRQVFNAQKKAQSSTDGSSGSETPGTSESATPESSGSEVEFSHEYWMRHALTLAKRARDEREVPVGAVLVLNNRVIGEGWNRAIGLHDPSPEDNEQKQLFVEQHKHYLDEIIEQISEFSKRVILADANLDKVLSAYNKHRDKPIREQAENIIHLFTLTNLGAPAAFKYFDTTIDRKRYTSTKEVLDATLIHQSITGLYETRIDLSQLGGD

SEQ ID NO: 309 - protein, 160 aa, Staphylococcus aureus
  REGION 1..160: note = MISC_FEATURE - TadA polypeptide sequence
MGSHMTNDIYFMTLAIEEAKKAAQLGEVPIGAIITKDDEVIARAHNLRETLQQPTAHAEHIAIERAAKVLGSWRLEGCTLYVTLEPCVMCAGTIVMSRIPRVVYGADDPKGGCSGSLMNLLQQSNFNHRAIVDKGVLKEACSTLLTTFFKNLRANKKSTN

SEQ ID NO: 310 - protein, 161 aa, Bacillus subtilis
  REGION 1..161: note = MISC_FEATURE - TadA polypeptide sequence
MTQDELYMKEAIKEAKKAEEKGEVPIGAVLVINGEIIARAHNLRETEQRSIAHAEMLVIDEACKALGTWRLEGATLYVTLEPCPMCAGAVVLSRVEKVVFGAFDPKGGCSGTLMNLLQEERFNHQAEVVSGVLEEECGGMLSAFFRELRKKKKAARKNLSE

SEQ ID NO: 311 - protein, 183 aa, Salmonella enterica
  REGION 1..183: note = MISC_FEATURE - TadA polypeptide sequence
  source 1..183: note = serovar Typhimurium
MPPAFITGVTSLSDVELDHEYWMRHALTLAKRAWDEREVPVGAVLVHNHRVIGEGWNRPIGRHDPTAHAEIMALRQGGLVLQNYRLLDTTLYVTLEPCVMCAGAMVHSRIGRVVFGARDAKTGAAGSLIDVLHHPGMNHRVEIIEGVLRDECATLLSDFFRMRRQEIKALKKADRAEGAGPAV

SEQ ID NO: 312 - protein, 164 aa, Shewanella putrefaciens
  REGION 1..164: note = MISC_FEATURE - TadA polypeptide sequence
MDEYWMQVAMQMAEKAEAAGEVPVGAVLVKDGQQIATGYNLSISQHDPTAHAEILCLRSAGKKLENYRLLDATLYITLEPCAMCAGAMVHSRIARVVYGARDEKTGAAGTVVNLLQHPAFNHQVEVTSGVLAEACSAQLSRFFKRRRDEKKALKLAQRAQQGIE

SEQ ID NO: 313 - protein, 173 aa, Haemophilus influenzae
  REGION 1..173: note = MISC_FEATURE - TadA polypeptide sequence
MDAAKVRSEFDEKMMRYALELADKAEALGEIPVGAVLVDDARNIIGEGWNLSIVQSDPTAHAEIIALRNGAKNIQNYRLLNSTLYVTLEPCTMCAGAILHSRIKRLVFGASDYKTGAIGSRFHFFDDYKMNHTLEITSGVLAEECSQKLSTFFQKRREEKKIEKALLKSLSDK

SEQ ID NO: 314 - protein, 161 aa, Caulobacter crescentus
  REGION 1..161: note = MISC_FEATURE - TadA polypeptide sequence
MRTDESEDQDHRMMRLALDAARAAAEAGETPVGAVILDPSTGEVIATAGNGPIAAHDPTAHAEIAAMRAAAAKLGNYRLTDLTLVVTLEPCAMCAGAISHARIGRVVFGADDPKGGAVVHGPKFFAQPTCHWRPEVTGGVLADESADLLRGFFRARRKAKI

SEQ ID NO: 315 - protein, 179 aa, Geobacter sulfurreducens
  REGION 1..179: note = MISC_FEATURE - TadA polypeptide sequence
MSSLKKTPIRDDAYWMGKAIREAAKAAARDEVPIGAVIVRDGAVIGRGHNLREGSNDPSAHAEMIAIRQAARRSANWRLTGATLYVTLEPCLMCMGAIILARLERVVFGCYDPKGGAAGSLYDLSADPRLNHQVRLSPGVCQEECGTMLSDFFRDLRRRKKAKATPALFIDERKVPPEP

SEQ ID NO: 316 - protein, 167 aa, synthetic construct
  REGION 1..167: note = TadA*8 polypeptide sequence
MSEVEFSHEYWMRHALTLAKRARDEREVPVGAVLVLNNRVIGEGWNRAIGLHDPTAHAEIMALRQGGLVMQNYRLIDATLYVTFEPCVMCAGAMIHSRIGRVVFGVRNAKTGAAGSLMDVLHYPGMNHRVEITEGILADECAALLCTFFRMPRQVFNAQKKAQSSTD

SEQ ID NO: 317 - RNA, 80 nt, synthetic construct
  misc_feature 1..80: note = gRNA scaffold polynucleotide sequence
  source 1..80: mol_type = other RNA
gttttagagctagaaatagcaagttaaaataaggctagtccgttatcaacttgaaaaagtggcaccgagtcggtgctttt

SEQ ID NO: 318 - RNA, 125 nt, synthetic construct
  misc_feature 1..125: note = gRNA scaffold polynucleotide sequence
  source 1..125: mol_type = other RNA
gtttttgtactctcaagatttaagtaactgtacaacgaaacttacacagttacttaaatcttgcagaagctacaaagataaggcttcatgccgaaatcaacaccctgtcattttatggcagggtg

SEQ ID NO: 319 - RNA, 76 nt, Streptococcus pyogenes
  misc_feature 1..76: note = S. pyogenes gRNA scaffold oligonucleotide sequence
  source 1..76: mol_type = other RNA
gttttagagctagaaatagcaagttaaaataaggctagtccgttatcaacttgaaaaagtggcaccgagtcggtgc

SEQ ID NO: 320 - RNA, 84 nt, Staphylococcus aureus
  misc_feature 1..84: note = S. aureus gRNA scaffold oligonucleotide sequence
  source 1..84: mol_type = other RNA
gttttagtactctgtaatgaaaattacagaatctactaaaacaaggcaaaatgccgtgtttatctcgtcaacttgttggcgaga

SEQ ID NO: 321 - RNA, 97 nt, Bacillus hisashii
  misc_feature 1..97: note = BhCas12b gRNA scaffold oligonucleotide sequence
  source 1..97: mol_type = other RNA
gttctgtcttttggtcaggacaaccgtctagctataagtgctgcagggtgtgagaaactcctattgctggacgatgtctcttacgaggcattagcac

SEQ ID NO: 322 - RNA, 88 nt, Bacillus sp.
  misc_feature 1..88: note = BvCas12b gRNA scaffold oligonucleotide sequence
  source 1..88: mol_type = other RNA
gacctatagggtcaatgaatctgtgcgtgtgccataagtaattaaaaattacccaccacaggagcacctgaaaacaggtgcttggcac

SEQ ID NO: 323 - RNA, 80 nt, synthetic construct
  misc_feature 1..80: note = gRNA scaffold nucleotide sequence; oligonucleotide sequence
  modified_base 78..80: mod_base = um
  misc_feature 78..80: note = In embodiments, a nucleotide(s) is linked to the preceding 5' nucleotide by a 3' phosphorothioate internucleotide linkage
  source 1..80: mol_type = other RNA
gttttagagctagaaatagcaagttaaaataaggctagtccgttatcaacttgaaaaagtgggaccgagtcggtgctttt

SEQ ID NO: 324 - RNA, 80 nt, synthetic construct; identical to SEQ ID NO: 317
  misc_feature 1..80: note = gRNA scaffold nucleotide sequence
  misc_feature 78..80: note = In embodiments, a nucleotide(s) is linked to the preceding 5' nucleotide by a 3' phosphorothioate internucleotide linkage
  modified_base 78..80: mod_base = um
  source 1..80: mol_type = other RNA

SEQ ID NO: 325 - RNA, 117 nt, Bacillus hisashii
  misc_feature 1..117: note = BhCas12b gRNA scaffold + guide sequence; oligonucleotide sequence
  misc_feature 1..97: note = BhCas12b sgRNA scaffold
  source 1..117: mol_type = other RNA
gttctgtcttttggtcaggacaaccgtctagctataagtgctgcagggtgtgagaaactcctattgctggacgatgtctcttacgaggcattagcacnnnnnnnnnnnnnnnnnnnn

SEQ ID NO: 326 - RNA, 108 nt, Bacillus sp.
  misc_feature 1..108: note = BvCas12b gRNA scaffold + guide sequence; oligonucleotide sequence
  misc_feature 1..88: note = BvCas12b gRNA scaffold
  source 1..108: mol_type = other RNA
gacctatagggtcaatgaatctgtgcgtgtgccataagtaattaaaaattacccaccacaggagcacctgaaaacaggtgcttggcacnnnnnnnnnnnnnnnnnnnn

SEQ ID NO: 327 - RNA, 119 nt, Alicyclobacillus acidiphilus
  misc_feature 1..119: note = AaCas12b gRNA scaffold + guide sequence; oligonucleotide sequence
  misc_feature 1..99: note = AaCas12b gRNA scaffold
  source 1..119: mol_type = other RNA
gtctaaaggacagaatttttcaacgggtgtgccaatggccactttccaggtggcaaagcccgttgaacttctcaaaaagaacgatctgagaagtggcacnnnnnnnnnnnnnnnnnnnn

SEQ ID NO: 328 - protein, 29 aa, synthetic construct
  REGION 1..29: note = synthetic polypeptide sequence
PKKKRKVEGADKRTADGSEFESPKKKRKV

SEQ ID NO: 329 - protein, 23 aa, synthetic construct
  REGION 1..23: note = synthetic peptide sequence
RKSGKIAAIVVKRPRKPKKKRKV

SEQ ID NO: 330 - protein, 8 aa, synthetic construct
  REGION 1..8: note = synthetic peptide sequence
SGGSSGGS

SEQ ID NO: 331 - protein, 1609 aa, synthetic construct
  REGION 1..1609: note = pNMG-B335ABE8.1_Y147T_CP5_NGC PAM_monomer polypeptide sequence
MSEVEFSHEYWMRHALTLAKRARDEREVPVGAVLVLNNRVIGEGWNRAIGLHDPTAHAEIMALRQGGLVMQNYRLIDATLYVTFEPCVMCAGAMIHSRIGRVVFGVRNAKTGAAGSLMDVLHYPGMNHRVEITEGILADECAALLCTFFRMPRQVFNAQKKAQSSTDSGGSSGGSSGSETPGTSESATPESSGGSSGGSEIGKATAKYFFYSNIMNFFKTEITLANGEIRKRPLIETNGETGEIVWDKGRDFATVRKVLSMPQVNIVKKTEVQTGGFSKESILPKRNSDKLIARKKDWDPKKYGGFMQPTVAYSVLVVAKVEKGKSKKLKSVKELLGITIMERSSFEKNPIDFLEAKGYKEVKKDLIIKLPKYSLFELENGRKRMLASAKFLQKGNELALPSKYVNFLYLASHYEKLKGSPEDNEQKQLFVEQHKHYLDEIIEQISEFSKRVILADANLDKVLSAYNKHRDKPIREQAENIIHLFTLTNLGAPRAFKYFDTTIARKEYRSTKEVLDATLIHQSITGLYETRIDLSQLGGDGGSGGSGGSGGSGGSGGSGGMDKKYSIGLAIGTNSVGWAVITDEYKVPSKKFKVLGNTDRHSIKKNLIGALLFDSGETAEATRLKRTARRRYTRRKNRICYLQEIFSNEMAKVDDSFFHRLEESFLVEEDKKHERHPIFGNIVDEVAYHEKYPTIYHLRKKLVDSTDKADLRLIYLALAHMIKFRGHFLIEGDLNPDNSDVDKLFIQLVQTYNQLFEENPINASGVDAKAILSARLSKSRRLENLIAQLPGEKKNGLFGNLIALSLGLTPNFKSNFDLAEDAKLQLSKDTYDDDLDNLLAQIGDQYADLFLAAKNLSDAILLSDILRVNTEITKAPLSASMIKRYDEHHQDLTLLKALVRQQLPEKYKEIFFDQSKNGYAGYIDGGASQEEFYKFIKPILEKMDGTEELLVKLNREDLLRKQRTFDNGSIPHQIHLGELHAILRRQEDFYPFLKDNREKIEKILTFRIPYYVGPLARGNSRFAWMTRKSEETITPWNFEEVVDKGASAQSFIERMTNFDKNLPNEKVLPKHSLLYEYFTVYNELTKVKYVTEGMRKPAFLSGEQKKAIVDLLFKTNRKVTVKQLKEDYFKKIECFDSVEISGVEDRFNASLGTYHDLLKIIKDKDFLDNEENEDILEDIVLTLTLFEDREMIEERLKTYAHLFDDKVMKQLKRRRYTGWGRLSRKLINGIRDKQSGKTILDFLKSDGFANRNFMQLIHDDSLTFKEDIQKAQVSGQGDSLHEHIANLAGSPAIKKGILQTVKVVDELVKVMGRHKPENIVIEMARENQTTQKGQKNSRERMKRIEEGIKELGSQILKEHPVENTQLQNEKLYLYYLQNGRDMYVDQELDINRLSDYDVDHIVPQSFLKDDSIDNKVLTRSDKNRGKSDNVPSEEVVKKMKNYWRQLLNAKLITQRKFDNLTKAERGGLSELDKAGFIKRQLVETRQITKHVAQILDSRMNTKYDENDKLIREVKVITLKSKLVSDFRKDFQFYKVREINNYHHAHDAYLNAVVGTALIKKYPKLESEFVYGDYKVYDVRKMIAKSEQEGADKRTADGSEFESPKKKRKV

SEQ ID NO: 332 - protein, 1807 aa, synthetic construct
  REGION 1..1807: note = pNMG-357_ABE8.14 with NGC PAMCP5 polypeptide sequence
  REGION 1..174: note = MISC_FEATURE - Adenosine deaminase sequence
  REGION 175..198: note = MISC_FEATURE - Linker sequence
  REGION 199..365: note = MISC_FEATURE - Adenosine deaminase sequence
  REGION 366..397: note = MISC_FEATURE - Linker sequence
  REGION 398..738: note = MISC_FEATURE - Sequence derived from Cas9
  REGION 739..759: note = MISC_FEATURE - Linker sequence
  REGION 760..1785: note = MISC_FEATURE - Sequence derived from Cas9
  REGION 1786..1807: note = MISC_FEATURE - Bipartite nuclear localization sequence
MSEVEFSHEYWMRHALTLAKRAWDEREVPVGAVLVHNNRVIGEGWNRPIGRHDPTAHAEIMALRQGGLVMQNYRLIDATLYVTLEPCVMCAGAMIHSRIGRVVFGARDAKTGAAGSLMDVLHHPGMNHRVEITEGILADECAALLSDFFRMRRQEIKAQKKAQSSTDGGSSGGSSGSETPGTSESATPESSGGSSGGSMSEVEFSHEYWMRHALTLAKRARDEREVPVGAVLVLNNRVIGEGWNRAIGLHDPTAHAEIMALRQGGLVMQNYRLIDATLYVTFEPCVMCAGAMIHSRIGRVVFGVRNAKTGAAGSLMDVLHYPGMNHRVEITEGILADECAALLCTFFRMPRQVFNAQKKAQSSTDSGGSSGGSSGSETPGTSESATPESSGGSSGGSEIGKATAKYFFYSNIMNFFKTEITLANGEIRKRPLIETNGETGEIVWDKGRDFATVRKVLSMPQVNIVKKTEVQTGGFSKESILPKRNSDKLIARKKDWDPKKYGGFMQPTVAYSVLVVAKVEKGKSKKLKSVKELLGITIMERSSFEKNPIDFLEAKGYKEVKKDLIIKLPKYSLFELENGRKRMLASAKFLQKGNELALPSKYVNFLYLASHYEKLKGSPEDNEQKQLFVEQHKHYLDEIIEQISEFSKRVILADANLDKVLSAYNKHRDKPIREQAENIIHLFTLTNLGAPRAFKYFDTTIARKEYRSTKEVLDATLIHQSITGLYETRIDLSQLGGDGGSGGSGGSGGSGGSGGSGGMDKKYSIGLAIGTNSVGWAVITDEYKVPSKKFKVLGNTDRHSIKKNLIGALLFDSGETAEATRLKRTARRRYTRRKNRICYLQEIFSNEMAKVDDSFFHRLEESFLVEEDKKHERHPIFGNIVDEVAYHEKYPTIYHLRKKLVDSTDKADLRLIYLALAHMIKFRGHFLIEGDLNPDNSDVDKLFIQLVQTYNQLFEENPINASGVDAKAILSARLSKSRRLENLIAQLPGEKKNGLFGNLIALSLGLTPNFKSNFDLAEDAKLQLSKDTYDDDLDNLLAQIGDQYADLFLAAKNLSDAILLSDILRVNTEITKAPLSASMIKRYDEHHQDLTLLKALVRQQLPEKYKEIFFDQSKNGYAGYIDGGASQEEFYKFIKPILEKMDGTEELLVKLNREDLLRKQRTFDNGSIPHQIHLGELHAILRRQEDFYPFLKDNREKIEKILTFRIPYYVGPLARGNSRFAWMTRKSEETITPWNFEEVVDKGASAQSFIERMTNFDKNLPNEKVLPKHSLLYEYFTVYNELTKVKYVTEGMRKPAFLSGEQKKAIVDLLFKTNRKVTVKQLKEDYFKKIECFDSVEISGVEDRFNASLGTYHDLLKIIKDKDFLDNEENEDILEDIVLTLTLFEDREMIEERLKTYAHLFDDKVMKQLKRRRYTGWGRLSRKLINGIRDKQSGKTILDFLKSDGFANRNFMQLIHDDSLTFKEDIQKAQVSGQGDSLHEHIANLAGSPAIKKGILQTVKVVDELVKVMGRHKPENIVIEMARENQTTQKGQKNSRERMKRIEEGIKELGSQILKEHPVENTQLQNEKLYLYYLQNGRDMYVDQELDINRLSDYDVDHIVPQSFLKDDSIDNKVLTRSDKNRGKSDNVPSEEVVKKMKNYWRQLLNAKLITQRKFDNLTKAERGGLSELDKAGFIKRQLVETRQITKHVAQILDSRMNTKYDENDKLIREVKVITLKSKLVSDFRKDFQFYKVREINNYHHAHDAYLNAVVGTALIKKYPKLESEFVYGDYKVYDVRKMIAKSEQEGADKRTADGSEFESPKKKRKV

SEQ ID NO: 333 - protein, 1588 aa, synthetic construct
  REGION 1..1588: note = ABE8.8-m polypeptide sequence
  REGION 1..167: note = MISC_FEATURE - Adenosine deaminase sequence
  REGION 168..199: note = MISC_FEATURE - Linker sequence
  REGION 200..1566: note = MISC_FEATURE - Sequence derived from Cas9
  REGION 1567..1588: note = MISC_FEATURE - Bipartite nuclear localization sequence
MSEVEFSHEYWMRHALTLAKRARDEREVPVGAVLVLNNRVIGEGWNRAIGLHDPTAHAEIMALRQGGLVMQNYRLIDATLYVTFEPCVMCAGAMIHSRIGRVVFGVRNAKTGAAGSLMDVLHHPGMNHRVEITEGILADECAALLCRFFRMPRRVFNAQKKAQSSTDSGGSSGGSSGSETPGTSESATPESSGGSSGGSDKKYSIGLAIGTNSVGWAVITDEYKVPSKKFKVLGNTDRHSIKKNLIGALLFDSGETAEATRLKRTARRRYTRRKNRICYLQEIFSNEMAKVDDSFFHRLEESFLVEEDKKHERHPIFGNIVDEVAYHEKYPTIYHLRKKLVDSTDKADLRLIYLALAHMIKFRGHFLIEGDLNPDNSDVDKLFIQLVQTYNQLFEENPINASGVDAKAILSARLSKSRRLENLIAQLPGEKKNGLFGNLIALSLGLTPNFKSNFDLAEDAKLQLSKDTYDDDLDNLLAQIGDQYADLFLAAKNLSDAILLSDILRVNTEITKAPLSASMIKRYDEHHQDLTLLKALVRQQLPEKYKEIFFDQSKNGYAGYIDGGASQEEFYKFIKPILEKMDGTEELLVKLNREDLLRKQRTFDNGSIPHQIHLGELHAILRRQEDFYPFLKDNREKIEKILTFRIPYYVGPLARGNSRFAWMTRKSEETITPWNFEEVVDKGASAQSFIERMTNFDKNLPNEKVLPKHSLLYEYFTVYNELTKVKYVTEGMRKPAFLSGEQKKAIVDLLFKTNRKVTVKQLKEDYFKKIECFDSVEISGVEDRFNASLGTYHDLLKIIKDKDFLDNEENEDILEDIVLTLTLFEDREMIEERLKTYAHLFDDKVMKQLKRRRYTGWGRLSRKLINGIRDKQSGKTILDFLKSDGFANRNFMQLIHDDSLTFKEDIQKAQVSGQGDSLHEHIANLAGSPAIKKGILQTVKVVDELVKVMGRHKPENIVIEMARENQTTQKGQKNSRERMKRIEEGIKELGSQILKEHPVENTQLQNEKLYLYYLQNGRDMYVDQELDINRLSDYDVDHIVPQSFLKDDSIDNKVLTRSDKNRGKSDNVPSEEVVKKMKNYWRQLLNAKLITQRKFDNLTKAERGGLSELDKAGFIKRQLVETRQITKHVAQILDSRMNTKYDENDKLIREVKVITLKSKLVSDFRKDFQFYKVREINNYHHAHDAYLNAVVGTALIKKYPKLESEFVYGDYKVYDVRKMIAKSEQEIGKATAKYFFYSNIMNFFKTEITLANGEIRKRPLIETNGETGEIVWDKGRDFATVRKVLSMPQVNIVKKTEVQTGGFSKESILPKRNSDKLIARKKDWDPKKYGGFDSPTVAYSVLVVAKVEKGKSKKLKSVKELLGITIMERSSFEKNPIDFLEAKGYKEVKKDLIIKLPKYSLFELENGRKRMLASAGELQKGNELALPSKYVNFLYLASHYEKLKGSPEDNEQKQLFVEQHKHYLDEIIEQISEFSKRVILADANLDKVLSAYNKHRDKPIREQAENIIHLFTLTNLGAPAAFKYFDTTIDRKRYTSTKEVLDATLIHQSITGLYETRIDLSQLGGDEGADKRTADGSEFESPKKKRKV

SEQ ID NO: 334 - protein, 1786 aa, synthetic construct
  REGION 1..1786: note = ABE8.8-d polypeptide sequence
  REGION 1..167: note = MISC_FEATURE - Adenosine deaminase sequence
  REGION 168..199: note = MISC_FEATURE - Linker sequence
  REGION 200..365: note = MISC_FEATURE - Adenosine deaminase sequence
  REGION 366..397: note = MISC_FEATURE - Linker sequence
  REGION 398..1764: note = MISC_FEATURE - Sequence derived from Cas9
  REGION 1765..1786: note = MISC_FEATURE - Bipartite nuclear localization sequence
MSEVEFSHEYWMRHALTLAKRAWDEREVPVGAVLVHNNRVIGEGWNRPIGRHDPTAHAEIMALRQGGLVMQNYRLIDATLYVTLEPCVMCAGAMIHSRIGRVVFGARDAKTGAAGSLMDVLHHPGMNHRVEITEGILADECAALLSDFFRMRRQEIKAQKKAQSSTDSGGSSGGSSGSETPGTSESATPESSGGSSGGSSEVEFSHEYWMRHALTLAKRARDEREVPVGAVLVLNNRVIGEGWNRAIGLHDPTAHAEIMALRQGGLVMQNYRLIDATLYVTFEPCVMCAGAMIHSRIGRVVFGVRNAKTGAAGSLMDVLHHPGMNHRVEITEGILADECAALLCRFFRMPRRVFNAQKKAQSSTDSGGSSGGSSGSETPGTSESATPESSGGSSGGSDKKYSIGLAIGTNSVGWAVITDEYKVPSKKFKVLGNTDRHSIKKNLIGALLFDSGETAEATRLKRTARRRYTRRKNRICYLQEIFSNEMAKVDDSFFHRLEESFLVEEDKKHERHPIFGNIVDEVAYHEKYPTIYHLRKKLVDSTDKADLRLIYLALAHMIKFRGHFLIEGDLNPDNSDVDKLFIQLVQTYNQLFEENPINASGVDAKAILSARLSKSRRLENLIAQLPGEKKNGLFGNLIALSLGLTPNFKSNFDLAEDAKLQLSKDTYDDDLDNLLAQIGDQYADLFLAAKNLSDAILLSDILRVNTEITKAPLSASMIKRYDEHHQDLTLLKALVRQQLPEKYKEIFFDQSKNGYAGYIDGGASQEEFYKFIKPILEKMDGTEELLVKLNREDLLRKQRTFDNGSIPHQIHLGELHAILRRQEDFYPFLKDNREKIEKILTFRIPYYVGPLARGNSRFAWMTRKSEETITPWNFEEVVDKGASAQSFIERMTNFDKNLPNEKVLPKHSLLYEYFTVYNELTKVKYVTEGMRKPAFLSGEQKKAIVDLLFKTNRKVTVKQLKEDYFKKIECFDSVEISGVEDRFNASLGTYHDLLKIIKDKDFLDNEENEDILEDIVLTLTLFEDREMIEERLKTYAHLFDDKVMKQLKRRRYTGWGRLSRKLINGIRDKQSGKTILDFLKSDGFANRNFMQLIHDDSLTFKEDIQKAQVSGQGDSLHEHIANLAGSPAIKKGILQTVKVVDELVKVMGRHKPENIVIEMARENQTTQKGQKNSRERMKRIEEGIKELGSQILKEHPVENTQLQNEKLYLYYLQNGRDMYVDQELDINRLSDYDVDHIVPQSFLKDDSIDNKVLTRSDKNRGKSDNVPSEEVVKKMKNYWRQLLNAKLITQRKFDNLTKAERGGLSELDKAGFIKRQLVETRQITKHVAQILDSRMNTKYDENDKLIREVKVITLKSKLVSDFRKDFQFYKVREINNYHHAHDAYLNAVVGTALIKKYPKLESEFVYGDYKVYDVRKMIAKSEQEIGKATAKYFFYSNIMNFFKTEITLANGEIRKRPLIETNGETGEIVWDKGRDFATVRKVLSMPQVNIVKKTEVQTGGFSKESILPKRNSDKLIARKKDWDPKKYGGFDSPTVAYSVLVVAKVEKGKSKKLKSVKELLGITIMERSSFEKNPIDFLEAKGYKEVKKDLIIKLPKYSLFELENGRKRMLASAGELQKGNELALPSKYVNFLYLASHYEKLKGSPEDNEQKQLFVEQHKHYLDEIIEQISEFSKRVILADANLDKVLSAYNKHRDKPIREQAENIIHLFTLTNLGAPAAFKYFDTTIDRKRYTSTKEVLDATLIHQSITGLYETRIDLSQLGGDEGADKRTADGSEFESPKKKRKV

SEQ ID NO: 335 - protein, 1588 aa, synthetic construct
  REGION 1..1588: note = ABE8.13-m polypeptide sequence
  REGION 1..167: note = MISC_FEATURE - Adenosine deaminase sequence
  REGION 168..199: note = MISC_FEATURE - Linker sequence
  REGION 200..1566: note = MISC_FEATURE - Sequence derived from Cas9
  REGION 1567..1588: note = MISC_FEATURE - Bipartite nuclear localization sequence
MSEVEFSHEYWMRHALTLAKRARDEREVPVGAVLVLNNRVIGEGWNRAIGLHDPTAHAEIMALRQGGLVMQNYRLYDATLYVTFEPCVMCAGAMIHSRIGRVVFGVRNAKTGAAGSLMDVLHHPGMNHRVEITEGILADECAALLCRFFRMPRRVFNAQKKAQSSTDSGGSSGGSSGSETPGTSESATPESSGGSSGGSDKKYSIGLAIGTNSVGWAVITDEYKVPSKKFKVLGNTDRHSIKKNLIGALLFDSGETAEATRLKRTARRRYTRRKNRICYLQEIFSNEMAKVDDSFFHRLEESFLVEEDKKHERHPIFGNIVDEVAYHEKYPTIYHLRKKLVDSTDKADLRLIYLALAHMIKFRGHFLIEGDLNPDNSDVDKLFIQLVQTYNQLFEENPINASGVDAKAILSARLSKSRRLENLIAQLPGEKKNGLFGNLIALSLGLTPNFKSNFDLAEDAKLQLSKDTYDDDLDNLLAQIGDQYADLFLAAKNLSDAILLSDILRVNTEITKAPLSASMIKRYDEHHQDLTLLKALVRQQLPEKYKEIFFDQSKNGYAGYIDGGASQEEFYKFIKPILEKMDGTEELLVKLNREDLLRKQRTFDNGSIPHQIHLGELHAILRRQEDFYPFLKDNREKIEKILTFRIPYYVGPLARGNSRFAWMTRKSEETITPWNFEEVVDKGASAQSFIERMTNFDKNLPNEKVLPKHSLLYEYFTVYNELTKVKYVTEGMRKPAFLSGEQKKAIVDLLFKTNRKVTVKQLKEDYFKKIECFDSVEISGVEDRFNASLGTYHDLLKIIKDKDFLDNEENEDILEDIVLTLTLFEDREMIEERLKTYAHLFDDKVMKQLKRRRYTGWGRLSRKLINGIRDKQSGKTILDFLKSDGFANRNFMQLIHDDSLTFKEDIQKAQVSGQGDSLHEHIANLAGSPAIKKGILQTVKVVDELVKVMGRHKPENIVIEMARENQTTQKGQKNSRERMKRIEEGIKELGSQILKEHPVENTQLQNEKLYLYYLQNGRDMYVDQELDINRLSDYDVDHIVPQSFLKDDSIDNKVLTRSDKNRGKSDNVPSEEVVKKMKNYWRQLLNAKLITQRKFDNLTKAERGGLSELDKAGFIKRQLVETRQITKHVAQILDSRMNTKYDENDKLIREVKVITLKSKLVSDFRKDFQFYKVREINNYHHAHDAYLNAVVGTALIKKYPKLESEFVYGDYKVYDVRKMIAKSEQEIGKATAKYFFYSNIMNFFKTEITLANGEIRKRPLIETNGETGEIVWDKGRDFATVRKVLSMPQVNIVKKTEVQTGGFSKESILPKRNSDKLIARKKDWDPKKYGGFDSPTVAYSVLVVAKVEKGKSKKLKSVKELLGITIMERSSFEKNPIDFLEAKGYKEVKKDLIIKLPKYSLFELENGRKRMLASAGELQKGNELALPSKYVNFLYLASHYEKLKGSPEDNEQKQLFVEQHKHYLDEIIEQISEFSKRVILADANLDKVLSAYNKHRDKPIREQAENIIHLFTLTNLGAPAAFKYFDTTIDRKRYTSTKEVLDATLIHQSITGLYETRIDLSQLGGDEGADKRTADGSEFESPKKKRKV

SEQ ID NO: 336 - protein, 1786 aa, synthetic construct
  REGION 1..1786: note = ABE8.13-d polypeptide sequence
  REGION 1..167: note = MISC_FEATURE - Adenosine deaminase sequence
  REGION 168..199: note = MISC_FEATURE - Linker sequence
  REGION 200..365: note = MISC_FEATURE - Adenosine deaminase sequence
  REGION 366..397: note = MISC_FEATURE - Linker sequence
  REGION 398..1764: note = MISC_FEATURE - Sequence derived from Cas9
  REGION 1765..1786: note = MISC_FEATURE - Bipartite nuclear localization sequence
MSEVEFSHEYWMRHALTLAKRAWDEREVPVGAVLVHNNRVIGEGWNRPIGRHDPTAHAEIMALRQGGLVMQNYRLIDATLYVTLEPCVMCAGAMIHSRIGRVVFGARDAKTGAAGSLMDVLHHPGMNHRVEITEGILADECAALLSDFFRMRRQEIKAQKKAQSSTDSGGSSGGSSGSETPGTSESATPESSGGSSGGSSEVEFSHEYWMRHALTLAKRARDEREVPVGAVLVLNNRVIGEGWNRAIGLHDPTAHAEIMALRQGGLVMQNYRLYDATLYVTFEPCVMCAGAMIHSRIGRVVFGVRNAKTGAAGSLMDVLHHPGMNHRVEITEGILADECAALLCRFFRMPRRVFNAQKKAQSSTDSGGSSGGSSGSETPGTSESATPESSGGSSGGSDKKYSIGLAIGTNSVGWAVITDEYKVPSKKFKVLGNTDRHSIKKNLIGALLFDSGETAEATRLKRTARRRYTRRKNRICYLQEIFSNEMAKVDDSFFHRLEESFLVEEDKKHERHPIFGNIVDEVAYHEKYPTIYHLRKKLVDSTDKADLRLIYLALAHMIKFRGHFLIEGDLNPDNSDVDKLFIQLVQTYNQLFEENPINASGVDAKAILSARLSKSRRLENLIAQLPGEKKNGLFGNLIALSLGLTPNFKSNFDLAEDAKLQLSKDTYDDDLDNLLAQIGDQYADLFLAAKNLSDAILLSDILRVNTEITKAPLSASMIKRYDEHHQDLTLLKALVRQQLPEKYKEIFFDQSKNGYAGYIDGGASQEEFYKFIKPILEKMDGTEELLVKLNREDLLRKQRTFDNGSIPHQIHLGELHAILRRQEDFYPFLKDNREKIEKILTFRIPYYVGPLARGNSRFAWMTRKSEETITPWNFEEVVDKGASAQSFIERMTNFDKNLPNEKVLPKHSLLYEYFTVYNELTKVKYVTEGMRKPAFLSGEQKKAIVDLLFKTNRKVTVKQLKEDYFKKIECFDSVEISGVEDRFNASLGTYHDLLKIIKDKDFLDNEENEDILEDIVLTLTLFEDREMIEERLKTYAHLFDDKVMKQLKRRRYTGWGRLSRKLINGIRDKQSGKTILDFLKSDGFANRNFMQLIHDDSLTFKEDIQKAQVSGQGDSLHEHIANLAGSPAIKKGILQTVKVVDELVKVMGRHKPENIVIEMARENQTTQKGQKNSRERMKRIEEGIKELGSQILKEHPVENTQLQNEKLYLYYLQNGRDMYVDQELDINRLSDYDVDHIVPQSFLKDDSIDNKVLTRSDKNRGKSDNVPSEEVVKKMKNYWRQLLNAKLITQRKFDNLTKAERGGLSELDKAGFIKRQLVETRQITKHVAQILDSRMNTKYDENDKLIREVKVITLKSKLVSDFRKDFQFYKVREINNYHHAHDAYLNAVVGTALIKKYPKLESEFVYGDYKVYDVRKMIAKSEQEIGKATAKYFFYSNIMNFFKTEITLANGEIRKRPLIETNGETGEIVWDKGRDFATVRKVLSMPQVNIVKKTEVQTGGFSKESILPKRNSDKLIARKKDWDPKKYGGFDSPTVAYSVLVVAKVEKGKSKKLKSVKELLGITIMERSSFEKNPIDFLEAKGYKEVKKDLIIKLPKYSLFELENGRKRMLASAGELQKGNELALPSKYVNFLYLASHYEKLKGSPEDNEQKQLFVEQHKHYLDEIIEQISEFSKRVILADANLDKVLSAYNKHRDKPIREQAENIIHLFTLTNLGAPAAFKYFDTTIDRKRYTSTKEVLDATLIHQSITGLYETRIDLSQLGGDEGADKRTADGSEFESPKKKRKV

SEQ ID NO: 337 - protein, 1588 aa, synthetic construct
  REGION 1..1588: note = ABE8.17-m polypeptide sequence
  REGION 1..167: note = MISC_FEATURE - Adenosine deaminase sequence
  REGION 168..199: note = MISC_FEATURE - Linker sequence
  REGION 200..1566: note = MISC_FEATURE - Sequence derived from Cas9
  REGION 1567..1588: note = MISC_FEATURE - Bipartite nuclear localization sequence
MSEVEFSHEYWMRHALTLAKRARDEREVPVGAVLVLNNRVIGEGWNRAIGLHDPTAHAEIMALRQGGLVMQNYRLIDATLYSTFEPCVMCAGAMIHSRIGRVVFGVRNAKTGAAGSLMDVLHYPGMNHRVEITEGILADECAALLCYFFRMPRRVFNAQKKAQSSTDSGGSSGGSSGSETPGTSESATPESSGGSSGGSDKKYSIGLAIGTNSVGWAVITDEYKVPSKKFKVLGNTDRHSIKKNLIGALLFDSGETAEATRLKRTARRRYTRRKNRICYLQEIFSNEMAKVDDSFFHRLEESFLVEEDKKHERHPIFGNIVDEVAYHEKYPTIYHLRKKLVDSTDKADLRLIYLALAHMIKFRGHFLIEGDLNPDNSDVDKLFIQLVQTYNQLFEENPINASGVDAKAILSARLSKSRRLENLIAQLPGEKKNGLFGNLIALSLGLTPNFKSNFDLAEDAKLQLSKDTYDDDLDNLLAQIGDQYADLFLAAKNLSDAILLSDILRVNTEITKAPLSASMIKRYDEHHQDLTLLKALVRQQLPEKYKEIFFDQSKNGYAGYIDGGASQEEFYKFIKPILEKMDGTEELLVKLNREDLLRKQRTFDNGSIPHQIHLGELHAILRRQEDFYPFLKDNREKIEKILTFRIPYYVGPLARGNSRFAWMTRKSEETITPWNFEEVVDKGASAQSFIERMTNFDKNLPNEKVLPKHSLLYEYFTVYNELTKVKYVTEGMRKPAFLSGEQKKAIVDLLFKTNRKVTVKQLKEDYFKKIECFDSVEISGVEDRFNASLGTYHDLLKIIKDKDFLDNEENEDILEDIVLTLTLFEDREMIEERLKTYAHLFDDKVMKQLKRRRYTGWGRLSRKLINGIRDKQSGKTILDFLKSDGFANRNFMQLIHDDSLTFKEDIQKAQVSGQGDSLHEHIANLAGSPAIKKGILQTVKVVDELVKVMGRHKPENIVIEMARENQTTQKGQKNSRERMKRIEEGIKELGSQILKEHPVENTQLQNEKLYLYYLQNGRDMYVDQELDINRLSDYDVDHIVPQSFLKDDSIDNKVLTRSDKNRGKSDNVPSEEVVKKMKNYWRQLLNAKLITQRKFDNLTKAERGGLSELDKAGFIKRQLVETRQITKHVAQILDSRMNTKYDENDKLIREVKVITLKSKLVSDFRKDFQFYKVREINNYHHAHDAYLNAVVGTALIKKYPKLESEFVYGDYKVYDVRKMIAKSEQEIGKATAKYFFYSNIMNFFKTEITLANGEIRKRPLIETNGETGEIVWDKGRDFATVRKVLSMPQVNIVKKTEVQTGGFSKESILPKRNSDKLIARKKDWDPKKYGGFDSPTVAYSVLVVAKVEKGKSKKLKSVKELLGITIMERSSFEKNPIDFLEAKGYKEVKKDLIIKLPKYSLFELENGRKRMLASAGELQKGNELALPSKYVNFLYLASHYEKLKGSPEDNEQKQLFVEQHKHYLDEIIEQISEFSKRVILADANLDKVLSAYNKHRDKPIREQAENIIHLFTLTNLGAPAAFKYFDTTIDRKRYTSTKEVLDATLIHQSITGLYETRIDLSQLGGDEGADKRTADGSEFESPKKKRKV

SEQ ID NO: 338 - protein, 1786 aa, synthetic construct
  REGION 1..1786: note = ABE8.17-d polypeptide sequence
  REGION 1..167: note = MISC_FEATURE - Adenosine deaminase sequence
  REGION 168..199: note = MISC_FEATURE - Linker sequence
  REGION 200..365: note = MISC_FEATURE - Adenosine deaminase sequence
  REGION 366..397: note = MISC_FEATURE - Linker sequence
  REGION 398..1764: note = MISC_FEATURE - Sequence derived from Cas9
  REGION 1765..1786: note = MISC_FEATURE - Bipartite nuclear localization sequence
MSEVEFSHEYWMRHALTLAKRAWDEREVPVGAVLVHNNRVIGEGWNRPIGRHDPTAHAEIMALRQGGLVMQNYRLIDATLYVTLEPCVMCAGAMIHSRIGRVVFGARDAKTGAAGSLMDVLHHPGMNHRVEITEGILADECAALLSDFFRMRRQEIKAQKKAQSSTDSGGSSGGSSGSETPGTSESATPESSGGSSGGSSEVEFSHEYWMRHALTLAKRARDEREVPVGAVLVLNNRVIGEGWNRAIGLHDPTAHAEIMALRQGGLVMQNYRLIDATLYSTFEPCVMCAGAMIHSRIGRVVFGVRNAKTGAAGSLMDVLHYPGMNHRVEITEGILADECAALLCYFFRMPRRVFNAQKKAQSSTDSGGSSGGSSGSETPGTSESATPESSGGSSGGSDKKYSIGLAIGTNSVGWAVITDEYKVPSKKFKVLGNTDRHSIKKNLIGALLFDSGETAEATRLKRTARRRYTRRKNRICYLQEIFSNEMAKVDDSFFHRLEESFLVEEDKKHERHPIFGNIVDEVAYHEKYPTIYHLRKKLVDSTDKADLRLIYLALAHMIKFRGHFLIEGDLNPDNSDVDKLFIQLVQTYNQLFEENPINASGVDAKAILSARLSKSRRLENLIAQLPGEKKNGLFGNLIALSLGLTPNFKSNFDLAEDAKLQLSKDTYDDDLDNLLAQIGDQYADLFLAAKNLSDAILLSDILRVNTEITKAPLSASMIKRYDEHHQDLTLLKALVRQQLPEKYKEIFFDQSKNGYAGYIDGGASQEEFYKFIKPILEKMDGTEELLVKLNREDLLRKQRTFDNGSIPHQIHLGELHAILRRQEDFYPFLKDNREKIEKILTFRIPYYVGPLARGNSRFAWMTRKSEETITPWNFEEVVDKGASAQSFIERMTNFDKNLPNEKVLPKHSLLYEYFTVYNELTKVKYVTEGMRKPAFLSGEQKKAIVDLLFKTNRKVTVKQLKEDYFKKIECFDSVEISGVEDRFNASLGTYHDLLKIIKDKDFLDNEENEDILEDIVLTLTLFEDREMIEERLKTYAHLFDDKVMKQLKRRRYTGWGRLSRKLINGIRDKQSGKTILDFLKSDGFANRNFMQLIHDDSLTFKEDIQKAQVSGQGDSLHEHIANLAGSPAIKKGILQTVKVVDELVKVMGRHKPENIVIEMARENQTTQKGQKNSRERMKRIEEGIKELGSQILKEHPVENTQLQNEKLYLYYLQNGRDMYVDQELDINRLSDYDVDHIVPQSFLKDDSIDNKVLTRSDKNRGKSDNVPSEEVVKKMKNYWRQLLNAKLITQRKFDNLTKAERGGLSELDKAGFIKRQLVETRQITKHVAQILDSRMNTKYDENDKLIREVKVITLKSKLVSDFRKDFQFYKVREINNYHHAHDAYLNAVVGTALIKKYPKLESEFVYGDYKVYDVRKMIAKSEQEIGKATAKYFFYSNIMNFFKTEITLANGEIRKRPLIETNGETGEIVWDKGRDFATVRKVLSMPQVNIVKKTEVQTGGFSKESILPKRNSDKLIARKKDWDPKKYGGFDSPTVAYSVLVVAKVEKGKSKKLKSVKELLGITIMERSSFEKNPIDFLEAKGYKEVKKDLIIKLPKYSLFELENGRKRMLASAGELQKGNELALPSKYVNFLYLASHYEKLKGSPEDNEQKQLFVEQHKHYLDEIIEQISEFSKRVILADANLDKVLSAYNKHRDKPIREQAENIIHLFTLTNLGAPAAFKYFDTTIDRKRYTSTKEVLDATLIHQSITGLYETRIDLSQLGGDEGADKRTADGSEFESPKKKRKV

SEQ ID NO: 339 - protein, 1588 aa, synthetic construct
  REGION 1..1588: note = ABE8.20-m polypeptide sequence
  REGION 1..167: note = MISC_FEATURE - Adenosine deaminase sequence
  REGION 168..199: note = MISC_FEATURE - Linker sequence
  REGION 200..1566: note = MISC_FEATURE - Sequence derived from Cas9
  REGION 1567..1588: note = MISC_FEATURE - Bipartite nuclear localization sequence
MSEVEFSHEYWMRHALTLAKRARDEREVPVGAVLVLNNRVIGEGWNRAIGLHDPTAHAEIMALRQGGLVMQNYRLYDATLYSTFEPCVMCAGAMIHSRIGRVVFGVRNAKTGAAGSLMDVLHHPGMNHRVEITEGILADECAALLCRFFRMPRRVFNAQKKAQSSTDSGGSSGGSSGSETPGTSESATPESSGGSSGGSDKKYSIGLAIGTNSVGWAVITDEYKVPSKKFKVLGNTDRHSIKKNLIGALLFDSGETAEATRLKRTARRRYTRRKNRICYLQEIFSNEMAKVDDSFFHRLEESFLVEEDKKHERHPIFGNIVDEVAYHEKYPTIYHLRKKLVDSTDKADLRLIYLALAHMIKFRGHFLIEGDLNPDNSDVDKLFIQLVQTYNQLFEENPINASGVDAKAILSARLSKSRRLENLIAQLPGEKKNGLFGNLIALSLGLTPNFKSNFDLAEDAKLQLSKDTYDDDLDNLLAQIGDQYADLFLAAKNLSDAILLSDILRVNTEITKAPLSASMIKRYDEHHQDLTLLKALVRQQLPEKYKEIFFDQSKNGYAGYIDGGASQEEFYKFIKPILEKMDGTEELLVKLNREDLLRKQRTFDNGSIPHQIHLGELHAILRRQEDFYPFLKDNREKIEKILTFRIPYYVGPLARGNSRFAWMTRKSEETITPWNFEEVVDKGASAQSFIERMTNFDKNLPNEKVLPKHSLLYEYFTVYNELTKVKYVTEGMRKPAFLSGEQKKAIVDLLFKTNRKVTVKQLKEDYFKKIECFDSVEISGVEDRFNASLGTYHDLLKIIKDKDFLDNEENEDILEDIVLTLTLFEDREMIEERLKTYAHLFDDKVMKQLKRRRYTGWGRLSRKLINGIRDKQSGKTILDFLKSDGFANRNFMQLIHDDSLTFKEDIQKAQVSGQGDSLHEHIANLAGSPAIKKGILQTVKVVDELVKVMGRHKPENIVIEMARENQTTQKGQKNSRERMKRIEEGIKELGSQILKEHPVENTQLQNEKLYLYYLQNGRDMYVDQELDINRLSDYDVDHIVPQSFLKDDSIDNKVLTRSDKNRGKSDNVPSEEVVKKMKNYWRQLLNAKLITQRKFDNLTKAERGGLSELDKAGFIKRQLVETRQITKHVAQILDSRMNTKYDENDKLIREVKVITLKSKLVSDFRKDFQFYKVREINNYHHAHDAYLNAVVGTALIKKYPKLESEFVYGDYKVYDVRKMIAKSEQEIGKATAKYFFYSNIMNFFKTEITLANGEIRKRPLIETNGETGEIVWDKGRDFATVRKVLSMPQVNIVKKTEVQTGGFSKESILPKRNSDKLIARKKDWDPKKYGGFDSPTVAYSVLVVAKVEKGKSKKLKSVKELLGITIMERSSFEKNPIDFLEAKGYKEVKKDLIIKLPKYSLFELENGRKRMLASAGELQKGNELALPSKYVNFLYLASHYEKLKGSPEDNEQKQLFVEQHKHYLDEIIEQISEFSKRVILADANLDKVLSAYNKHRDKPIREQAENIIHLFTLTNLGAPAAFKYFDTTIDRKRYTSTKEVLDATLIHQSITGLYETRIDLSQLGGDEGADKRTADGSEFESPKKKRKV

SEQ ID NO: 340 - protein, 1786 aa, synthetic construct
  REGION 1..1786: note = ABE8.20-d polypeptide sequence
  REGION 1..167: note = MISC_FEATURE - Adenosine deaminase sequence
  REGION 168..199: note = MISC_FEATURE - Linker sequence
  REGION 200..365: note = MISC_FEATURE - Adenosine deaminase sequence
  REGION 366..397: note = MISC_FEATURE - Linker sequence
  REGION 398..1764: note = MISC_FEATURE - Sequence derived from Cas9
  REGION 1765..1786: note = MISC_FEATURE - Bipartite nuclear localization sequence
MSEVEFSHEYWMRHALTLAKRAWDEREVPVGAVLVHNNRVIGEGWNRPIGRHDPTAHAEIMALRQGGLVMQNYRLIDATLYVTLEPCVMCAGAMIHSRIGRVVFGARDAKTGAAGSLMDVLHHPGMNHRVEITEGILADECAALLSDFFRMRRQEIKAQKKAQSSTDSGGSSGGSSGSETPGTSESATPESSGGSSGGSSEVEFSHEYWMRHALTLAKRARDEREVPVGAVLVLNNRVIGEGWNRAIGLHDPTAHAEIMALRQGGLVMQNYRLYDATLYSTFEPCVMCAGAMIHSRIGRVVFGVRNAKTGAAGSLMDVLHHPGMNHRVEITEGILADECAALLCRFFRMPRRVFNAQKKAQSSTDSGGSSGGSSGSETPGTSESATPESSGGSSGGSDKKYSIGLAIGTNSVGWAVITDEYKVPSKKFKVLGNTDRHSIKKNLIGALLFDSGETAEATRLKRTARRRYTRRKNRICYLQEIFSNEMAKVDDSFFHRLEESFLVEEDKKHERHPIFGNIVDEVAYHEKYPTIYHLRKKLVDSTDKADLRLIYLALAHMIKFRGHFLIEGDLNPDNSDVDKLFIQLVQTYNQLFEENPINASGVDAKAILSARLSKSRRLENLIAQLPGEKKNGLFGNLIALSLGLTPNFKSNFDLAEDAKLQLSKDTYDDDLDNLLAQIGDQYADLFLAAKNLSDAILLSDILRVNTEITKAPLSASMIKRYDEHHQDLTLLKALVRQQLPEKYKEIFFDQSKNGYAGYIDGGASQEEFYKFIKPILEKMDGTEELLVKLNREDLLRKQRTFDNGSIPHQIHLGELHAILRRQEDFYPFLKDNREKIEKILTFRIPYYVGPLARGNSRFAWMTRKSEETITPWNFEEVVDKGASAQSFIERMTNFDKNLPNEKVLPKHSLLYEYFTVYNELTKVKYVTEGMRKPAFLSGEQKKAIVDLLFKTNRKVTVKQLKEDYFKKIECFDSVEISGVEDRFNASLGTYHDLLKIIKDKDFLDNEENEDILEDIVLTLTLFEDREMIEERLKTYAHLFDDKVMKQLKRRRYTGWGRLSRKLINGIRDKQSGKTILDFLKSDGFANRNFMQLIHDDSLTFKEDIQKAQVSGQGDSLHEHIANLAGSPAIKKGILQTVKVVDELVKVMGRHKPENIVIEMARENQTTQKGQKNSRERMKRIEEGIKELGSQILKEHPVENTQLQNEKLYLYYLQNGRDMYVDQELDINRLSDYDVDHIVPQSFLKDDSIDNKVLTRSDKNRGKSDNVPSEEVVKKMKNYWRQLLNAKLITQRKFDNLTKAERGGLSELDKAGFIKRQLVETRQITKHVAQILDSRMNTKYDENDKLIREVKVITLKSKLVSDFRKDFQFYKVREINNYHHAHDAYLNAVVGTALIKKYPKLESEFVYGDYKVYDVRKMIAKSEQEIGKATAKYFFYSNIMNFFKTEITLANGEIRKRPLIETNGETGEIVWDKGRDFATVRKVLSMPQVNIVKKTEVQTGGFSKESILPKRNSDKLIARKKDWDPKKYGGFDSPTVAYSVLVVAKVEKGKSKKLKSVKELLGITIMERSSFEKNPIDFLEAKGYKEVKKDLIIKLPKYSLFELENGRKRMLASAGELQKGNELALPSKYVNFLYLASHYEKLKGSPEDNEQKQLFVEQHKHYLDEIIEQISEFSKRVILADANLDKVLSAYNKHRDKPIREQAENIIHLFTLTNLGAPAAFKYFDTTIDRKRYTSTKEVLDATLIHQSITGLYETRIDLSQLGGDEGADKRTADGSEFESPKKKRKV

SEQ ID NO: 341 - protein, 1588 aa, synthetic construct
  REGION 1..1588: note = 01. monoABE8.1_bpNLS + Y147T polypeptide sequence
MSEVEFSHEYWMRHALTLAKRARDEREVPVGAVLVLNNRVIGEGWNRAIGLHDPTAHAEIMALRQGGLVMQNYRLIDATLYVTFEPCVMCAGAMIHSRIGRVVFGVRNAKTGAAGSLMDVLHYPGMNHRVEITEGILADECAALLCTFFRMPRQVFNAQKKAQSSTDSGGSSGGSSGSETPGTSESATPESSGGSSGGSDKKYSIGLAIGTNSVGWAVITDEYKVPSKKFKVLGNTDRHSIKKNLIGALLFDSGETAEATRLKRTARRRYTRRKNRICYLQEIFSNEMAKVDDSFFHRLEESFLVEEDKKHERHPIFGNIVDEVAYHEKYPTIYHLRKKLVDSTDKADLRLIYLALAHMIKFRGHFLIEGDLNPDNSDVDKLFIQLVQTYNQLFEENPINASGVDAKAILSARLSKSRRLENLIAQLPGEKKNGLFGNLIALSLGLTPNFKSNFDLAEDAKLQLSKDTYDDDLDNLLAQIGDQYADLFLAAKNLSDAILLSDILRVNTEITKAPLSASMIKRYDEHHQDLTLLKALVRQQLPEKYKEIFFDQSKNGYAGYIDGGASQEEFYKFIKPILEKMDGTEELLVKLNREDLLRKQRTFDNGSIPHQIHLGELHAILRRQEDFYPFLKDNREKIEKILTFRIPYYVGPLARGNSRFAWMTRKSEETITPWNFEEVVDKGASAQSFIERMTNFDKNLPNEKVLPKHSLLYEYFTVYNELTKVKYVTEGMRKPAFLSGEQKKAIVDLLFKTNRKVTVKQLKEDYFKKIECFDSVEISGVEDRFNASLGTYHDLLKIIKDKDFLDNEENEDILEDIVLTLTLFEDREMIEERLKTYAHLFDDKVMKQLKRRRYTGWGRLSRKLINGIRDKQSGKTILDFLKSDGFANRNFMQLIHDDSLTFKEDIQKAQVSGQGDSLHEHIANLAGSPAIKKGILQTVKVVDELVKVMGRHKPENIVIEMARENQTTQKGQKNSRERMKRIEEGIKELGSQILKEHPVENTQLQNEKLYLYYLQNGRDMYVDQELDINRLSDYDVDHIVPQSFLKDDSIDNKVLTRSDKNRGKSDNVPSEEVVKKMKNYWRQLLNAKLITQRKFDNLTKAERGGLSELDKAGFIKRQLVETRQITKHVAQILDSRMNTKYDENDKLIREVKVITLKSKLVSDFRKDFQFYKVREINNYHHAHDAYLNAVVGTALIKKYPKLESEFVYGDYKVYDVRKMIAKSEQEIGKATAKYFFYSNIMNFFKTEITLANGEIRKRPLIETNGETGEIVWDKGRDFATVRKVLSMPQVNIVKKTEVQTGGFSKESILPKRNSDKLIARKKDWDPKKYGGFVSPTVAYSVLVVAKVEKGKSKKLKSVKELLGITIMERSSFEKNPIDFLEAKGYKEVKKDLIIKLPKYSLFELENGRKRMLASARELQKGNELALPSKYVNFLYLASHYEKLKGSPEDNEQKQLFVEQHKHYLDEIIEQISEFSKRVILADANLDKVLSAYNKHRDKPIREQAENIIHLFTLTNLGAPAAFKYFDTTIDRKQYRSTKEVLDATLIHQSITGLYETRIDLSQLGGDEGADKRTADGSEFESPKKKRKV

SEQ ID NO: 342 - protein, 1588 aa, synthetic construct
  REGION 1..1588: note = 02. monoABE8.1_bpNLS + Y147R polypeptide sequence
MSEVEFSHEYWMRHALTLAKRARDEREVPVGAVLVLNNRVIGEGWNRAIGLHDPTAHAEIMALRQGGLVMQNYRLIDATLYVTFEPCVMCAGAMIHSRIGRVVFGVRNAKTGAAGSLMDVLHYPGMNHRVEITEGILADECAALLCRFFRMPRQVFNAQKKAQSSTDSGGSSGGSSGSETPGTSESATPESSGGSSGGSDKKYSIGLAIGTNSVGWAVITDEYKVPSKKFKVLGNTDRHSIKKNLIGALLFDSGETAEATRLKRTARRRYTRRKNRICYLQEIFSNEMAKVDDSFFHRLEESFLVEEDKKHERHPIFGNIVDEVAYHEKYPTIYHLRKKLVDSTDKADLRLIYLALAHMIKFRGHFLIEGDLNPDNSDVDKLFIQLVQTYNQLFEENPINASGVDAKAILSARLSKSRRLENLIAQLPGEKKNGLFGNLIALSLGLTPNFKSNFDLAEDAKLQLSKDTYDDDLDNLLAQIGDQYADLFLAAKNLSDAILLSDILRVNTEITKAPLSASMIKRYDEHHQDLTLLKALVRQQLPEKYKEIFFDQSKNGYAGYIDGGASQEEFYKFIKPILEKMDGTEELLVKLNREDLLRKQRTFDNGSIPHQIHLGELHAILRRQEDFYPFLKDNREKIEKILTFRIPYYVGPLARGNSRFAWMTRKSEETITPWNFEEVVDKGASAQSFIERMTNFDKNLPNEKVLPKHSLLYEYFTVYNELTKVKYVTEGMRKPAFLSGEQKKAIVDLLFKTNRKVTVKQLKEDYFKKIECFDSVEISGVEDRFNASLGTYHDLLKIIKDKDFLDNEENEDILEDIVLTLTLFEDREMIEERLKTYAHLFDDKVMKQLKRRRYTGWGRLSRKLINGIRDKQSGKTILDFLKSDGFANRNFMQLIHDDSLTFKEDIQKAQVSGQGDSLHEHIANLAGSPAIKKGILQTVKVVDELVKVMGRHKPENIVIEMARENQTTQKGQKNSRERMKRIEEGIKELGSQILKEHPVENTQLQNEKLYLYYLQNGRDMYVDQELDINRLSDYDVDHIVPQSFLKDDSIDNKVLTRSDKNRGKSDNVPSEEVVKKMKNYWRQLLNAKLITQRKFDNLTKAERGGLSELDKAGFIKRQLVETRQITKHVAQILDSRMNTKYDENDKLIREVKVITLKSKLVSDFRKDFQFYKVREINNYHHAHDAYLNAVVGTALIKKYPKLESEFVYGDYKVYDVRKMIAKSEQEIGKATAKYFFYSNIMNFFKTEITLANGEIRKRPLIETNGETGEIVWDKGRDFATVRKVLSMPQVNIVKKTEVQTGGFSKESILPKRNSDKLIARKKDWDPKKYGGFVSPTVAYSVLVVAKVEKGKSKKLKSVKELLGITIMERSSFEKNPIDFLEAKGYKEVKKDLIIKLPKYSLFELENGRKRMLASARELQKGNELALPSKYVNFLYLASHYEKLKGSPEDNEQKQLFVEQHKHYLDEIIEQISEFSKRVILADANLDKVLSAYNKHRDKPIREQAENIIHLFTLTNLGAPAAFKYFDTTIDRKQYRSTKEVLDATLIHQSITGLYETRIDLSQLGGDEGADKRTADGSEFESPKKKRKV

SEQ ID NO: 343 - protein, 1588 aa, synthetic construct
  REGION 1..1588: note = 03. monoABE8.1_bpNLS + Q154S polypeptide sequence
MSEVEFSHEYWMRHALTLAKRARDEREVPVGAVLVLNNRVIGEGWNRAIGLHDPTAHAEIMALRQGGLVMQNYRLIDATLYVTFEPCVMCAGAMIHSRIGRVVFGVRNAKTGAAGSLMDVLHYPGMNHRVEITEGILADECAALLCYFFRMPRSVFNAQKKAQSSTDSGGSSGGSSGSETPGTSESATPESSGGSSGGSDKKYSIGLAIGTNSVGWAVITDEYKVPSKKFKVLGNTDRHSIKKNLIGALLFDSGETAEATRLKRTARRRYTRRKNRICYLQEIFSNEMAKVDDSFFHRLEESFLVEEDKKHERHPIFGNIVDEVAYHEKYPTIYHLRKKLVDSTDKADLRLIYLALAHMIKFRGHFLIEGDLNPDNSDVDKLFIQLVQTYNQLFEENPINASGVDAKAILSARLSKSRRLENLIAQLPGEKKNGLFGNLIALSLGLTPNFKSNFDLAEDAKLQLSKDTYDDDLDNLLAQIGDQYADLFLAAKNLSDAILLSDILRVNTEITKAPLSASMIKRYDEHHQDLTLLKALVRQQLPEKYKEIFFDQSKNGYAGYIDGGASQEEFYKFIKPILEKMDGTEELLVKLNREDLLRKQRTFDNGSIPHQIHLGELHAILRRQEDFYPFLKDNREKIEKILTFRIPYYVGPLARGNSRFAWMTRKSEETITPWNFEEVVDKGASAQSFIERMTNFDKNLPNEKVLPKHSLLYEYFTVYNELTKVKYVTEGMRKPAFLSGEQKKAIVDLLFKTNRKVTVKQLKEDYFKKIECFDSVEISGVEDRFNASLGTYHDLLKIIKDKDFLDNEENEDILEDIVLTLTLFEDREMIEERLKTYAHLFDDKVMKQLKRRRYTGWGRLSRKLINGIRDKQSGKTILDFLKSDGFANRNFMQLIHDDSLTFKEDIQKAQVSGQGDSLHEHIANLAGSPAIKKGILQTVKVVDELVKVMGRHKPENIVIEMARENQTTQKGQKNSRERMKRIEEGIKELGSQILKEHPVENTQLQNEKLYLYYLQNGRDMYVDQELDINRLSDYDVDHIVPQSFLKDDSIDNKVLTRSDKNRGKSDNVPSEEVVKKMKNYWRQLLNAKLITQRKFDNLTKAERGGLSELDKAGFIKRQLVETRQITKHVAQILDSRMNTKYDENDKLIREVKVITLKSKLVSDFRKDFQFYKVREINNYHHAHDAYLNAVVGTALIKKYPKLESEFVYGDYKVYDVRKMIAKSEQEIGKATAKYFFYSNIMNFFKTEITLANGEIRKRPLIETNGETGEIVWDKGRDFATVRKVLSMPQVNIVKKTEVQTGGFSKESILPKRNSDKLIARKKDWDPKKYGGFVSPTVAYSVLVVAKVEKGKSKKLKSVKELLGITIMERSSFEKNPIDFLEAKGYKEVKKDLIIKLPKYSLFELENGRKRMLASARELQKGNELALPSKYVNFLYLASHYEKLKGSPEDNEQKQLFVEQHKHYLDEIIEQISEFSKRVILADANLDKVLSAYNKHRDKPIREQAENIIHLFTLTNLGAPAAFKYFDTTIDRKQYRSTKEVLDATLIHQSITGLYETRIDLSQLGGDEGADKRTADGSEFESPKKKRKV

SEQ ID NO: 344 - protein, 1588 aa, synthetic construct
  REGION 1..1588: note = 04. monoABE8.1_bpNLS + Y123H polypeptide sequence
MSEVEFSHEYWMRHALTLAKRARDEREVPVGAVLVLNNRVIGEGWNRAIGLHDPTAHAEIMALRQGGLVMQNYRLIDATLYVTFEPCVMCAGAMIHSRIGRVVFGVRNAKTGAAGSLMDVLHHPGMNHRVEITEGILADECAALLCYFFRMPRQVFNAQKKAQSSTDSGGSSGGSSGSETPGTSESATPESSGGSSGGSDKKYSIGLAIGTNSVGWAVITDEYKVPSKKFKVLGNTDRHSIKKNLIGALLFDSGETAEATRLKRTARRRYTRRKNRICYLQEIFSNEMAKVDDSFFHRLEESFLVEEDKKHERHPIFGNIVDEVAYHEKYPTIYHLRKKLVDSTDKADLRLIYLALAHMIKFRGHFLIEGDLNPDNSDVDKLFIQLVQTYNQLFEENPINASGVDAKAILSARLSKSRRLENLIAQLPGEKKNGLFGNLIALSLGLTPNFKSNFDLAEDAKLQLSKDTYDDDLDNLLAQIGDQYADLFLAAKNLSDAILLSDILRVNTEITKAPLSASMIKRYDEHHQDLTLLKALVRQQLPEKYKEIFFDQSKNGYAGYIDGGASQEEFYKFIKPILEKMDGTEELLVKLNREDLLRKQRTFDNGSIPHQIHLGELHAILRRQEDFYPFLKDNREKIEKILTFRIPYYVGPLARGNSRFAWMTRKSEETITPWNFEEVVDKGASAQSFIERMTNFDKNLPNEKVLPKHSLLYEYFTVYNELTKVKYVTEGMRKPAFLSGEQKKAIVDLLFKTNRKVTVKQLKEDYFKKIECFDSVEISGVEDRFNASLGTYHDLLKIIKDKDFLDNEENEDILEDIVLTLTLFEDREMIEERLKTYAHLFDDKVMKQLKRRRYTGWGRLSRKLINGIRDKQSGKTILDFLKSDGFANRNFMQLIHDDSLTFKEDIQKAQVSGQGDSLHEHIANLAGSPAIKKGILQTVKVVDELVKVMGRHKPENIVIEMARENQTTQKGQKNSRERMKRIEEGIKELGSQILKEHPVENTQLQNEKLYLYYLQNGRDMYVDQELDINRLSDYDVDHIVPQSFLKDDSIDNKVLTRSDKNRGKSDNVPSEEVVKKMKNYWRQLLNAKLITQRKFDNLTKAERGGLSELDKAGFIKRQLVETRQITKHVAQILDSRMNTKYDENDKLIREVKVITLKSKLVSDFRKDFQFYKVREINNYHHAHDAYLNAVVGTALIKKYPKLESEFVYGDYKVYDVRKMIAKSEQEIGKATAKYFFYSNIMNFFKTEITLANGEIRKRPLIETNGETGEIVWDKGRDFATVRKVLSMPQVNIVKKTEVQTGGFSKESILPKRNSDKLIARKKDWDPKKYGGFVSPTVAYSVLVVAKVEKGKSKKLKSVKELLGITIMERSSFEKNPIDFLEAKGYKEVKKDLIIKLPKYSLFELENGRKRMLASARELQKGNELALPSKYVNFLYLASHYEKLKGSPEDNEQKQLFVEQHKHYLDEIIEQISEFSKRVILADANLDKVLSAYNKHRDKPIREQAENIIHLFTLTNLGAPAAFKYFDTTIDRKQYRSTKEVLDATLIHQSITGLYETRIDLSQLGGDEGADKRTADGSEFESPKKKRKV

SEQ ID NO: 345 - protein, 1588 aa, synthetic construct
  REGION 1..1588: note = 05. monoABE8.1_bpNLS + V82S polypeptide sequence
MSEVEFSHEYWMRHALTLAKRARDEREVPVGAVLVLNNRVIGEGWNRAIGLHDPTAHAEIMALRQGGLVMQNYRLIDATLYSTFEPCVMCAGAMIHSRIGRVVFGVRNAKTGAAGSLMDVLHYPGMNHRVEITEGILADECAALLCYFFRMPRQVFNAQKKAQSSTDSGGSSGGSSGSETPGTSESATPESSGGSSGGSDKKYSIGLAIGTNSVGWAVITDEYKVPSKKFKVLGNTDRHSIKKNLIGALLFDSGETAEATRLKRTARRRYTRRKNRICYLQEIFSNEMAKVDDSFFHRLEESFLVEEDKKHERHPIFGNIVDEVAYHEKYPTIYHLRKKLVDSTDKADLRLIYLALAHMIKFRGHFLIEGDLNPDNSDVDKLFIQLVQTYNQLFEENPINASGVDAKAILSARLSKSRRLENLIAQLPGEKKNGLFGNLIALSLGLTPNFKSNFDLAEDAKLQLSKDTYDDDLDNLLAQIGDQYADLFLAAKNLSDAILLSDILRVNTEITKAPLSASMIKRYDEHHQDLTLLKALVRQQLPEKYKEIFFDQSKNGYAGYIDGGASQEEFYKFIKPILEKMDGTEELLVKLNREDLLRKQRTFDNGSIPHQIHLGELHAILRRQEDFYPFLKDNREKIEKILTFRIPYYVGPLARGNSRFAWMTRKSEETITPWNFEEVVDKGASAQSFIERMTNFDKNLPNEKVLPKHSLLYEYFTVYNELTKVKYVTEGMRKPAFLSGEQKKAIVDLLFKTNRKVTVKQLKEDYFKKIECFDSVEISGVEDRFNASLGTYHDLLKIIKDKDFLDNEENEDILEDIVLTLTLFEDREMIEERLKTYAHLFDDKVMKQLKRRRYTGWGRLSRKLINGIRDKQSGKTILDFLKSDGFANRNFMQLIHDDSLTFKEDIQKAQVSGQGDSLHEHIANLAGSPAIKKGILQTVKVVDELVKVMGRHKPENIVIEMARENQTTQKGQKNSRERMKRIEEGIKELGSQILKEHPVENTQLQNEKLYLYYLQNGRDMYVDQELDINRLSDYDVDHIVPQSFLKDDSIDNKVLTRSDKNRGKSDNVPSEEVVKKMKNYWRQLLNAKLITQRKFDNLTKAERGGLSELDKAGFIKRQLVETRQITKHVAQILDSRMNTKYDENDKLIREVKVITLKSKLVSDFRKDFQFYKVREINNYHHAHDAYLNAVVGTALIKKYPKLESEFVYGDYKVYDVRKMIAKSEQEIGKATAKYFFYSNIMNFFKTEITLANGEIRKRPLIETNGETGEIVWDKGRDFATVRKVLSMPQVNIVKKTEVQTGGFSKESILPKRNSDKLIARKKDWDPKKYGGFVSPTVAYSVLVVAKVEKGKSKKLKSVKELLGITIMERSSFEKNPIDFLEAKGYKEVKKDLIIKLPKYSLFELENGRKRMLASARELQKGNELALPSKYVNFLYLASHYEKLKGSPEDNEQKQLFVEQHKHYLDEIIEQISEFSKRVILADANLDKVLSAYNKHRDKPIREQAENIIHLFTLTNLGAPAAFKYFDTTIDRKQYRSTKEVLDATLIHQSITGLYETRIDLSQLGGDEGADKRTADGSEFESPKKKRKV

SEQ ID NO: 346 - protein, 1588 aa, synthetic construct
  REGION 1..1588: note = 06. monoABE8.1_bpNLS + T166R polypeptide sequence
MSEVEFSHEYWMRHALTLAKRARDEREVPVGAVLVLNNRVIGEGWNRAIGLHDPTAHAEIMALRQGGLVMQNYRLIDATLYVTFEPCVMCAGAMIHSRIGRVVFGVRNAKTGAAGSLMDVLHYPGMNHRVEITEGILADECAALLCYFFRMPRQVFNAQKKAQSSRDSGGSSGGSSGSETPGTSESATPESSGGSSGGSDKKYSIGLAIGTNSVGWAVITDEYKVPSKKFKVLGNTDRHSIKKNLIGALLFDSGETAEATRLKRTARRRYTRRKNRICYLQEIFSNEMAKVDDSFFHRLEESFLVEEDKKHERHPIFGNIVDEVAYHEKYPTIYHLRKKLVDSTDKADLRLIYLALAHMIKFRGHFLIEGDLNPDNSDVDKLFIQLVQTYNQLFEENPINASGVDAKAILSARLSKSRRLENLIAQLPGEKKNGLFGNLIALSLGLTPNFKSNFDLAEDAKLQLSKDTYDDDLDNLLAQIGDQYADLFLAAKNLSDAILLSDILRVNTEITKAPLSASMIKRYDEHHQDLTLLKALVRQQLPEKYKEIFFDQSKNGYAGYIDGGASQEEFYKFIKPILEKMDGTEELLVKLNREDLLRKQRTFDNGSIPHQIHLGELHAILRRQEDFYPFLKDNREKIEKILTFRIPYYVGPLARGNSRFAWMTRKSEETITPWNFEEVVDKGASAQSFIERMTNFDKNLPNEKVLPKHSLLYEYFTVYNELTKVKYVTEGMRKPAFLSGEQKKAIVDLLFKTNRKVTVKQLKEDYFKKIECFDSVEISGVEDRFNASLGTYHDLLKIIKDKDFLDNEENEDILEDIVLTLTLFEDREMIEERLKTYAHLFDDKVMKQLKRRRYTGWGRLSRKLINGIRDKQSGKTILDFLKSDGFANRNFMQLIHDDSLTFKEDIQKAQVSGQGDSLHEHIANLAGSPAIKKGILQTVKVVDELVKVMGRHKPENIVIEMARENQTTQKGQKNSRERMKRIEEGIKELGSQILKEHPVENTQLQNEKLYLYYLQNGRDMYVDQELDINRLSDYDVDHIVPQSFLKDDSIDNKVLTRSDKNRGKSDNVPSEEVVKKMKNYWRQLLNAKLITQRKFDNLTKAERGGLSELDKAGFIKRQLVETRQITKHVAQILDSRMNTKYDENDKLIREVKVITLKSKLVSDFRKDFQFYKVREINNYHHAHDAYLNAVVGTALIKKYPKLESEFVYGDYKVYDVRKMIAKSEQEIGKATAKYFFYSNIMNFFKTEITLANGEIRKRPLIETNGETGEIVWDKGRDFATVRKVLSMPQVNIVKKTEVQTGGFSKESILPKRNSDKLIARKKDWDPKKYGGFVSPTVAYSVLVVAKVEKGKSKKLKSVKELLGITIMERSSFEKNPIDFLEAKGYKEVKKDLIIKLPKYSLFELENGRKRMLASARELQKGNELALPSKYVNFLYLASHYEKLKGSPEDNEQKQLFVEQHKHYLDEIIEQISEFSKRVILADANLDKVLSAYNKHRDKPIREQAENIIHLFTLTNLGAPAAFKYFDTTIDRKQYRSTKEVLDATLIHQSITGLYETRIDLSQLGGDEGADKRTADGSEFESPKKKRKV

SEQ ID NO: 347 - protein, 1588 aa, synthetic construct
  REGION 1..1588: note = 07. monoABE8.1_bpNLS + Q154R polypeptide sequence
MSEVEFSHEYWMRHALTLAKRARDEREVPVGAVLVLNNRVIGEGWNRAIGLHDPTAHAEIMALRQGGLVMQNYRLIDATLYVTFEPCVMCAGAMIHSRIGRVVFGVRNAKTGAAGSLMDVLHYPGMNHRVEITEGILADECAALLCYFFRMPRRVFNAQKKAQSSTDSGGSSGGSSGSETPGTSESATPESSGGSSGGSDKKYSIGLAIGTNSVGWAVITDEYKVPSKKFKVLGNTDRHSIKKNLIGALLFDSGETAEATRLKRTARRRYTRRKNRICYLQEIFSNEMAKVDDSFFHRLEESFLVEEDKKHERHPIFGNIVDEVAYHEKYPTIYHLRKKLVDSTDKADLRLIYLALAHMIKFRGHFLIEGDLNPDNSDVDKLFIQLVQTYNQLFEENPINASGVDAKAILSARLSKSRRLENLIAQLPGEKKNGLFGNLIALSLGLTPNFKSNFDLAEDAKLQLSKDTYDDDLDNLLAQIGDQYADLFLAAKNLSDAILLSDILRVNTEITKAPLSASMIKRYDEHHQDLTLLKALVRQQLPEKYKEIFFDQSKNGYAGYIDGGASQEEFYKFIKPILEKMDGTEELLVKLNREDLLRKQRTFDNGSIPHQIHLGELHAILRRQEDFYPFLKDNREKIEKILTFRIPYYVGPLARGNSRFAWMTRKSEETITPWNFEEVVDKGASAQSFIERMTNFDKNLPNEKVLPKHSLLYEYFTVYNELTKVKYVTEGMRKPAFLSGEQKKAIVDLLFKTNRKVTVKQLKEDYFKKIECFDSVEISGVEDRFNASLGTYHDLLKIIKDKDFLDNEENEDILEDIVLTLTLFEDREMIEERLKTYAHLFDDKVMKQLKRRRYTGWGRLSRKLINGIRDKQSGKTILDFLKSDGFANRNFMQLIHDDSLTFKEDIQKAQVSGQGDSLHEHIANLAGSPAIKKGILQTVKVVDELVKVMGRHKPENIVIEMARENQTTQKGQKNSRERMKRIEEGIKELGSQILKEHPVENTQLQNEKLYLYYLQNGRDMYVDQELDINRLSDYDVDHIVPQSFLKDDSIDNKVLTRSDKNRGKSDNVPSEEVVKKMKNYWRQLLNAKLITQRKFDNLTKAERGGLSELDKAGFIKRQLVETRQITKHVAQILDSRMNTKYDENDKLIREVKVITLKSKLVSDFRKDFQFYKVREINNYHHAHDAYLNAVVGTALIKKYPKLESEFVYGDYKVYDVRKMIAKSEQEIGKATAKYFFYSNIMNFFKTEITLANGEIRKRPLIETNGETGEIVWDKGRDFATVRKVLSMPQVNIVKKTEVQTGGFSKESILPKRNSDKLIARKKDWDPKKYGGFVSPTVAYSVLVVAKVEKGKSKKLKSVKELLGITIMERSSFEKNPIDFLEAKGYKEVKKDLIIKLPKYSLFELENGRKRMLASARELQKGNELALPSKYVNFLYLASHYEKLKGSPEDNEQKQLFVEQHKHYLDEIIEQISEFSKRVILADANLDKVLSAYNKHRDKPIREQAENIIHLFTLTNLGAPAAFKYFDTTIDRKQYRSTKEVLDATLIHQSITGLYETRIDLSQLGGDEGADKRTADGSEFESPKKKRKV

SEQ ID NO: 348 - protein, 1588 aa, synthetic construct
  REGION 1..1588: note = 08. monoABE8.1_bpNLS +Y147R_Q154R_Y123H polypeptide sequence
MSEVEFSHEYWMRHALTLAKRARDEREVPVGAVLVLNNRVIGEGWNRAIGLHDPTAHAEIMALRQGGLVMQNYRLIDATLYVTFEPCVMCAGAMIHSRIGRVVFGVRNAKTGAAGSLMDVLHHPGMNHRVEITEGILADECAALLCRFFRMPRRVFNAQKKAQSSTDSGGSSGGSSGSETPGTSESATPESSGGSSGGSDKKYSIGLAIGTNSVGWAVITDEYKVPSKKFKVLGNTDRHSIKKNLIGALLFDSGETAEATRLKRTARRRYTRRKNRICYLQEIFSNEMAKVDDSFFHRLEESFLVEEDKKHERHPIFGNIVDEVAYHEKYPTIYHLRKKLVDSTDKADLRLIYLALAHMIKFRGHFLIEGDLNPDNSDVDKLFIQLVQTYNQLFEENPINASGVDAKAILSARLSKSRRLENLIAQLPGEKKNGLFGNLIALSLGLTPNFKSNFDLAEDAKLQLSKDTYDDDLDNLLAQIGDQYADLFLAAKNLSDAILLSDILRVNTEITKAPLSASMIKRYDEHHQDLTLLKALVRQQLPEKYKEIFFDQSKNGYAGYIDGGASQEEFYKFIKPILEKMDGTEELLVKLNREDLLRKQRTFDNGSIPHQIHLGELHAILRRQEDFYPFLKDNREKIEKILTFRIPYYVGPLARGNSRFAWMTRKSEETITPWNFEEVVDKGASAQSFIERMTNFDKNLPNEKVLPKHSLLYEYFTVYNELTKVKYVTEGMRKPAFLSGEQKKAIVDLLFKTNRKVTVKQLKEDYFKKIECFDSVEISGVEDRFNASLGTYHDLLKIIKDKDFLDNEENEDILEDIVLTLTLFEDREMIEERLKTYAHLFDDKVMKQLKRRRYTGWGRLSRKLINGIRDKQSGKTILDFLKSDGFANRNFMQLIHDDSLTFKEDIQKAQVSGQGDSLHEHIANLAGSPAIKKGILQTVKVVDELVKVMGRHKPENIVIEMARENQTTQKGQKNSRERMKRIEEGIKELGSQILKEHPVENTQLQNEKLYLYYLQNGRDMYVDQELDINRLSDYDVDHIVPQSFLKDDSIDNKVLTRSDKNRGKSDNVPSEEVVKKMKNYWRQLLNAKLITQRKFDNLTKAERGGLSELDKAGFIKRQLVETRQITKHVAQILDSRMNTKYDENDKLIREVKVITLKSKLVSDFRKDFQFYKVREINNYHHAHDAYLNAVVGTALIKKYPKLESEFVYGDYKVYDVRKMIAKSEQEIGKATAKYFFYSNIMNFFKTEITLANGEIRKRPLIETNGETGEIVWDKGRDFATVRKVLSMPQVNIVKKTEVQTGGFSKESILPKRNSDKLIARKKDWDPKKYGGFVSPTVAYSVLVVAKVEKGKSKKLKSVKELLGITIMERSSFEKNPIDFLEAKGYKEVKKDLIIKLPKYSLFELENGRKRMLASARELQKGNELALPSKYVNFLYLASHYEKLKGSPEDNEQKQLFVEQHKHYLDEIIEQISEFSKRVILADANLDKVLSAYNKHRDKPIREQAENIIHLFTLTNLGAPAAFKYFDTTIDRKQYRSTKEVLDATLIHQSITGLYETRIDLSQLGGDEGADKRTADGSEFESPKKKRKV

SEQ ID NO: 349 - protein, 1588 aa, synthetic construct
  REGION 1..1588: note = 09. monoABE8.1_bpNLS +Y147R_Q154R_I76Y polypeptide sequence
MSEVEFSHEYWMRHALTLAKRARDEREVPVGAVLVLNNRVIGEGWNRAIGLHDPTAHAEIMALRQGGLVMQNYRLYDATLYVTFEPCVMCAGAMIHSRIGRVVFGVRNAKTGAAGSLMDVLHYPGMNHRVEITEGILADECAALLCRFFRMPRRVFNAQKKAQSSTDSGGSSGGSSGSETPGTSESATPESSGGSSGGSDKKYSIGLAIGTNSVGWAVITDEYKVPSKKFKVLGNTDRHSIKKNLIGALLFDSGETAEATRLKRTARRRYTRRKNRICYLQEIFSNEMAKVDDSFFHRLEESFLVEEDKKHERHPIFGNIVDEVAYHEKYPTIYHLRKKLVDSTDKADLRLIYLALAHMIKFRGHFLIEGDLNPDNSDVDKLFIQLVQTYNQLFEENPINASGVDAKAILSARLSKSRRLENLIAQLPGEKKNGLFGNLIALSLGLTPNFKSNFDLAEDAKLQLSKDTYDDDLDNLLAQIGDQYADLFLAAKNLSDAILLSDILRVNTEITKAPLSASMIKRYDEHHQDLTLLKALVRQQLPEKYKEIFFDQSKNGYAGYIDGGASQEEFYKFIKPILEKMDGTEELLVKLNREDLLRKQRTFDNGSIPHQIHLGELHAILRRQEDFYPFLKDNREKIEKILTFRIPYYVGPLARGNSRFAWMTRKSEETITPWNFEEVVDKGASAQSFIERMTNFDKNLPNEKVLPKHSLLYEYFTVYNELTKVKYVTEGMRKPAFLSGEQKKAIVDLLFKTNRKVTVKQLKEDYFKKIECFDSVEISGVEDRFNASLGTYHDLLKIIKDKDFLDNEENEDILEDIVLTLTLFEDREMIEERLKTYAHLFDDKVMKQLKRRRYTGWGRLSRKLINGIRDKQSGKTILDFLKSDGFANRNFMQLIHDDSLTFKEDIQKAQVSGQGDSLHEHIANLAGSPAIKKGILQTVKVVDELVKVMGRHKPENIVIEMARENQTTQKGQKNSRERMKRIEEGIKELGSQILKEHPVENTQLQNEKLYLYYLQNGRDMYVDQELDINRLSDYDVDHIVPQSFLKDDSIDNKVLTRSDKNRGKSDNVPSEEVVKKMKNYWRQLLNAKLITQRKFDNLTKAERGGLSELDKAGFIKRQLVETRQITKHVAQILDSRMNTKYDENDKLIREVKVITLKSKLVSDFRKDFQFYKVREINNYHHAHDAYLNAVVGTALIKKYPKLESEFVYGDYKVYDVRKMIAKSEQEIGKATAKYFFYSNIMNFFKTEITLANGEIRKRPLIETNGETGEIVWDKGRDFATVRKVLSMPQVNIVKKTEVQTGGFSKESILPKRNSDKLIARKKDWDPKKYGGFVSPTVAYSVLVVAKVEKGKSKKLKSVKELLGITIMERSSFEKNPIDFLEAKGYKEVKKDLIIKLPKYSLFELENGRKRMLASARELQKGNELALPSKYVNFLYLASHYEKLKGSPEDNEQKQLFVEQHKHYLDEIIEQISEFSKRVILADANLDKVLSAYNKHRDKPIREQAENIIHLFTLTNLGAPAAFKYFDTTIDRKQYRSTKEVLDATLIHQSITGLYETRIDLSQLGGDEGADKRTADGSEFESPKKKRKV

SEQ ID NO: 350 - protein, 1588 aa, synthetic construct
  REGION 1..1588: note = 10. monoABE8.1_bpNLS +Y147R_Q154R_T166R polypeptide sequence
MSEVEFSHEYWMRHALTLAKRARDEREVPVGAVLVLNNRVIGEGWNRAIGLHDPTAHAEIMALRQGGLVMQNYRLIDATLYVTFEPCVMCAGAMIHSRIGRVVFGVRNAKTGAAGSLMDVLHYPGMNHRVEITEGILADECAALLCRFFRMPRRVFNAQKKAQSSRDSGGSSGGSSGSETPGTSESATPESSGGSSGGSDKKYSIGLAIGTNSVGWAVITDEYKVPSKKFKVLGNTDRHSIKKNLIGALLFDSGETAEATRLKRTARRRYTRRKNRICYLQEIFSNEMAKVDDSFFHRLEESFLVEEDKKHERHPIFGNIVDEVAYHEKYPTIYHLRKKLVDSTDKADLRLIYLALAHMIKFRGHFLIEGDLNPDNSDVDKLFIQLVQTYNQLFEENPINASGVDAKAILSARLSKSRRLENLIAQLPGEKKNGLFGNLIALSLGLTPNFKSNFDLAEDAKLQLSKDTYDDDLDNLLAQIGDQYADLFLAAKNLSDAILLSDILRVNTEITKAPLSASMIKRYDEHHQDLTLLKALVRQQLPEKYKEIFFDQSKNGYAGYIDGGASQEEFYKFIKPILEKMDGTEELLVKLNREDLLRKQRTFDNGSIPHQIHLGELHAILRRQEDFYPFLKDNREKIEKILTFRIPYYVGPLARGNSRFAWMTRKSEETITPWNFEEVVDKGASAQSFIERMTNFDKNLPNEKVLPKHSLLYEYFTVYNELTKVKYVTEGMRKPAFLSGEQKKAIVDLLFKTNRKVTVKQLKEDYFKKIECFDSVEISGVEDRFNASLGTYHDLLKIIKDKDFLDNEENEDILEDIVLTLTLFEDREMIEERLKTYAHLFDDKVMKQLKRRRYTGWGRLSRKLINGIRDKQSGKTILDFLKSDGFANRNFMQLIHDDSLTFKEDIQKAQVSGQGDSLHEHIANLAGSPAIKKGILQTVKVVDELVKVMGRHKPENIVIEMARENQTTQKGQKNSRERMKRIEEGIKELGSQILKEHPVENTQLQNEKLYLYYLQNGRDMYVDQELDINRLSDYDVDHIVPQSFLKDDSIDNKVLTRSDKNRGKSDNVPSEEVVKKMKNYWRQLLNAKLITQRKFDNLTKAERGGLSELDKAGFIKRQLVETRQITKHVAQILDSRMNTKYDENDKLIREVKVITLKSKLVSDFRKDFQFYKVREINNYHHAHDAYLNAVVGTALIKKYPKLESEFVYGDYKVYDVRKMIAKSEQEIGKATAKYFFYSNIMNFFKTEITLANGEIRKRPLIETNGETGEIVWDKGRDFATVRKVLSMPQVNIVKKTEVQTGGFSKESILPKRNSDKLIARKKDWDPKKYGGFVSPTVAYSVLVVAKVEKGKSKKLKSVKELLGITIMERSSFEKNPIDFLEAKGYKEVKKDLIIKLPKYSLFELENGRKRMLASARELQKGNELALPSKYVNFLYLASHYEKLKGSPEDNEQKQLFVEQHKHYLDEIIEQISEFSKRVILADANLDKVLSAYNKHRDKPIREQAENIIHLFTLTNLGAPAAFKYFDTTIDRKQYRSTKEVLDATLIHQSITGLYETRIDLSQLGGDEGADKRTADGSEFESPKKKRKV

SEQ ID NO: 351 - protein, 1588 aa, synthetic construct
  REGION 1..1588: note = 11. monoABE8.1_bpNLS +Y147T_Q154R polypeptide sequence
MSEVEFSHEYWMRHALTLAKRARDEREVPVGAVLVLNNRVIGEGWNRAIGLHDPTAHAEIMALRQGGLVMQNYRLIDATLYVTFEPCVMCAGAMIHSRIGRVVFGVRNAKTGAAGSLMDVLHYPGMNHRVEITEGILADECAALLCTFFRMPRRVFNAQKKAQSSTDSGGSSGGSSGSETPGTSESATPESSGGSSGGSDKKYSIGLAIGTNSVGWAVITDEYKVPSKKFKVLGNTDRHSIKKNLIGALLFDSGETAEATRLKRTARRRYTRRKNRICYLQEIFSNEMAKVDDSFFHRLEESFLVEEDKKHERHPIFGNIVDEVAYHEKYPTIYHLRKKLVDSTDKADLRLIYLALAHMIKFRGHFLIEGDLNPDNSDVDKLFIQLVQTYNQLFEENPINASGVDAKAILSARLSKSRRLENLIAQLPGEKKNGLFGNLIALSLGLTPNFKSNFDLAEDAKLQLSKDTYDDDLDNLLAQIGDQYADLFLAAKNLSDAILLSDILRVNTEITKAPLSASMIKRYDEHHQDLTLLKALVRQQLPEKYKEIFFDQSKNGYAGYIDGGASQEEFYKFIKPILEKMDGTEELLVKLNREDLLRKQRTFDNGSIPHQIHLGELHAILRRQEDFYPFLKDNREKIEKILTFRIPYYVGPLARGNSRFAWMTRKSEETITPWNFEEVVDKGASAQSFIERMTNFDKNLPNEKVLPKHSLLYEYFTVYNELTKVKYVTEGMRKPAFLSGEQKKAIVDLLFKTNRKVTVKQLKEDYFKKIECFDSVEISGVEDRFNASLGTYHDLLKIIKDKDFLDNEENEDILEDIVLTLTLFEDREMIEERLKTYAHLFDDKVMKQLKRRRYTGWGRLSRKLINGIRDKQSGKTILDFLKSDGFANRNFMQLIHDDSLTFKEDIQKAQVSGQGDSLHEHIANLAGSPAIKKGILQTVKVVDELVKVMGRHKPENIVIEMARENQTTQKGQKNSRERMKRIEEGIKELGSQILKEHPVENTQLQNEKLYLYYLQNGRDMYVDQELDINRLSDYDVDHIVPQSFLKDDSIDNKVLTRSDKNRGKSDNVPSEEVVKKMKNYWRQLLNAKLITQRKFDNLTKAERGGLSELDKAGFIKRQLVETRQITKHVAQILDSRMNTKYDENDKLIREVKVITLKSKLVSDFRKDFQFYKVREINNYHHAHDAYLNAVVGTALIKKYPKLESEFVYGDYKVYDVRKMIAKSEQEIGKATAKYFFYSNIMNFFKTEITLANGEIRKRPLIETNGETGEIVWDKGRDFATVRKVLSMPQVNIVKKTEVQTGGFSKESILPKRNSDKLIARKKDWDPKKYGGFVSPTVAYSVLVVAKVEKGKSKKLKSVKELLGITIMERSSFEKNPIDFLEAKGYKEVKKDLIIKLPKYSLFELENGRKRMLASARELQKGNELALPSKYVNFLYLASHYEKLKGSPEDNEQKQLFVEQHKHYLDEIIEQISEFSKRVILADANLDKVLSAYNKHRDKPIREQAENIIHLFTLTNLGAPAAFKYFDTTIDRKQYRSTKEVLDATLIHQSITGLYETRIDLSQLGGDEGADKRTADGSEFESPKKKRKV

SEQ ID NO: 352 - protein, 1588 aa, synthetic construct
  REGION 1..1588: note = 12. monoABE8.1_bpNLS +Y147T_Q154S polypeptide sequence
MSEVEFSHEYWMRHALTLAKRARDEREVPVGAVLVLNNRVIGEGWNRAIGLHDPTAHAEIMALRQGGLVMQNYRLIDATLYVTFEPCVMCAGAMIHSRIGRVVFGVRNAKTGAAGSLMDVLHYPGMNHRVEITEGILADECAALLCTFFRMPRSVFNAQKKAQSSTDSGGSSGGSSGSETPGTSESATPESSGGSSGGSDKKYSIGLAIGTNSVGWAVITDEYKVPSKKFKVLGNTDRHSIKKNLIGALLFDSGETAEATRLKRTARRRYTRRKNRICYLQEIFSNEMAKVDDSFFHRLEESFLVEEDKKHERHPIFGNIVDEVAYHEKYPTIYHLRKKLVDSTDKADLRLIYLALAHMIKFRGHFLIEGDLNPDNSDVDKLFIQLVQTYNQLFEENPINASGVDAKAILSARLSKSRRLENLIAQLPGEKKNGLFGNLIALSLGLTPNFKSNFDLAEDAKLQLSKDTYDDDLDNLLAQIGDQYADLFLAAKNLSDAILLSDILRVNTEITKAPLSASMIKRYDEHHQDLTLLKALVRQQLPEKYKEIFFDQSKNGYAGYIDGGASQEEFYKFIKPILEKMDGTEELLVKLNREDLLRKQRTFDNGSIPHQIHLGELHAILRRQEDFYPFLKDNREKIEKILTFRIPYYVGPLARGNSRFAWMTRKSEETITPWNFEEVVDKGASAQSFIERMTNFDKNLPNEKVLPKHSLLYEYFTVYNELTKVKYVTEGMRKPAFLSGEQKKAIVDLLFKTNRKVTVKQLKEDYFKKIECFDSVEISGVEDRFNASLGTYHDLLKIIKDKDFLDNEENEDILEDIVLTLTLFEDREMIEERLKTYAHLFDDKVMKQLKRRRYTGWGRLSRKLINGIRDKQSGKTILDFLKSDGFANRNFMQLIHDDSLTFKEDIQKAQVSGQGDSLHEHIANLAGSPAIKKGILQTVKVVDELVKVMGRHKPENIVIEMARENQTTQKGQKNSRERMKRIEEGIKELGSQILKEHPVENTQLQNEKLYLYYLQNGRDMYVDQELDINRLSDYDVDHIVPQSFLKDDSIDNKVLTRSDKNRGKSDNVPSEEVVKKMKNYWRQLLNAKLITQRKFDNLTKAERGGLSELDKAGFIKRQLVETRQITKHVAQILDSRMNTKYDENDKLIREVKVITLKSKLVSDFRKDFQFYKVREINNYHHAHDAYLNAVVGTALIKKYPKLESEFVYGDYKVYDVRKMIAKSEQEIGKATAKYFFYSNIMNFFKTEITLANGEIRKRPLIETNGETGEIVWDKGRDFATVRKVLSMPQVNIVKKTEVQTGGFSKESILPKRNSDKLIARKKDWDPKKYGGFVSPTVAYSVLVVAKVEKGKSKKLKSVKELLGITIMERSSFEKNPIDFLEAKGYKEVKKDLIIKLPKYSLFELENGRKRMLASARELQKGNELALPSKYVNFLYLASHYEKLKGSPEDNEQKQLFVEQHKHYLDEIIEQISEFSKRVILADANLDKVLSAYNKHRDKPIREQAENIIHLFTLTNLGAPAAFKYFDTTIDRKQYRSTKEVLDATLIHQSITGLYETRIDLSQLGGDEGADKRTADGSEFESPKKKRKV

SEQ ID NO: 353 - protein, 1588 aa, synthetic construct
  REGION 1..1588: note = 13. monoABE8.1_bpNLS +H123Y123H_Y147R_Q154R_I76Y polypeptide sequence
MSEVEFSHEYWMRHALTLAKRARDEREVPVGAVLVLNNRVIGEGWNRAIGLHDPTAHAEIMALRQGGLVMQNYRLYDATLYVTFEPCVMCAGAMIHSRIGRVVFGVRNAKTGAAGSLMDVLHHPGMNHRVEITEGILADECAALLCRFFRMPRRVFNAQKKAQSSTDSGGSSGGSSGSETPGTSESATPESSGGSSGGSDKKYSIGLAIGTNSVGWAVITDEYKVPSKKFKVLGNTDRHSIKKNLIGALLFDSGETAEATRLKRTARRRYTRRKNRICYLQEIFSNEMAKVDDSFFHRLEESFLVEEDKKHERHPIFGNIVDEVAYHEKYPTIYHLRKKLVDSTDKADLRLIYLALAHMIKFRGHFLIEGDLNPDNSDVDKLFIQLVQTYNQLFEENPINASGVDAKAILSARLSKSRRLENLIAQLPGEKKNGLFGNLIALSLGLTPNFKSNFDLAEDAKLQLSKDTYDDDLDNLLAQIGDQYADLFLAAKNLSDAILLSDILRVNTEITKAPLSASMIKRYDEHHQDLTLLKALVRQQLPEKYKEIFFDQSKNGYAGYIDGGASQEEFYKFIKPILEKMDGTEELLVKLNREDLLRKQRTFDNGSIPHQIHLGELHAILRRQEDFYPFLKDNREKIEKILTFRIPYYVGPLARGNSRFAWMTRKSEETITPWNFEEVVDKGASAQSFIERMTNFDKNLPNEKVLPKHSLLYEYFTVYNELTKVKYVTEGMRKPAFLSGEQKKAIVDLLFKTNRKVTVKQLKEDYFKKIECFDSVEISGVEDRFNASLGTYHDLLKIIKDKDFLDNEENEDILEDIVLTLTLFEDREMIEERLKTYAHLFDDKVMKQLKRRRYTGWGRLSRKLINGIRDKQSGKTILDFLKSDGFANRNFMQLIHDDSLTFKEDIQKAQVSGQGDSLHEHIANLAGSPAIKKGILQTVKVVDELVKVMGRHKPENIVIEMARENQTTQKGQKNSRERMKRIEEGIKELGSQILKEHPVENTQLQNEKLYLYYLQNGRDMYVDQELDINRLSDYDVDHIVPQSFLKDDSIDNKVLTRSDKNRGKSDNVPSEEVVKKMKNYWRQLLNAKLITQRKFDNLTKAERGGLSELDKAGFIKRQLVETRQITKHVAQILDSRMNTKYDENDKLIREVKVITLKSKLVSDFRKDFQFYKVREINNYHHAHDAYLNAVVGTALIKKYPKLESEFVYGDYKVYDVRKMIAKSEQEIGKATAKYFFYSNIMNFFKTEITLANGEIRKRPLIETNGETGEIVWDKGRDFATVRKVLSMPQVNIVKKTEVQTGGFSKESILPKRNSDKLIARKKDWDPKKYGGFVSPTVAYSVLVVAKVEKGKSKKLKSVKELLGITIMERSSFEKNPIDFLEAKGYKEVKKDLIIKLPKYSLFELENGRKRMLASARELQKGNELALPSKYVNFLYLASHYEKLKGSPEDNEQKQLFVEQHKHYLDEIIEQISEFSKRVILADANLDKVLSAYNKHRDKPIREQAENIIHLFTLTNLGAPAAFKYFDTTIDRKQYRSTKEVLDATLIHQSITGLYETRIDLSQLGGDEGADKRTADGSEFESPKKKRKV

SEQ ID NO: 354 - protein, 1588 aa, synthetic construct
  REGION 1..1588: note = 14. monoABE8.1_bpNLS + V82S +Q154R polypeptide sequence
MSEVEFSHEYWMRHALTLAKRARDEREVPVGAVLVLNNRVIGEGWNRAIGLHDPTAHAEIMALRQGGLVMQNYRLIDATLYSTFEPCVMCAGAMIHSRIGRVVFGVRNAKTGAAGSLMDVLHYPGMNHRVEITEGILADECAALLCYFFRMPRRVFNAQKKAQSSTDSGGSSGGSSGSETPGTSESATPESSGGSSGGSDKKYSIGLAIGTNSVGWAVITDEYKVPSKKFKVLGNTDRHSIKKNLIGALLFDSGETAEATRLKRTARRRYTRRKNRICYLQEIFSNEMAKVDDSFFHRLEESFLVEEDKKHERHPIFGNIVDEVAYHEKYPTIYHLRKKLVDSTDKADLRLIYLALAHMIKFRGHFLIEGDLNPDNSDVDKLFIQLVQTYNQLFEENPINASGVDAKAILSARLSKSRRLENLIAQLPGEKKNGLFGNLIALSLGLTPNFKSNFDLAEDAKLQLSKDTYDDDLDNLLAQIGDQYADLFLAAKNLSDAILLSDILRVNTEITKAPLSASMIKRYDEHHQDLTLLKALVRQQLPEKYKEIFFDQSKNGYAGYIDGGASQEEFYKFIKPILEKMDGTEELLVKLNREDLLRKQRTFDNGSIPHQIHLGELHAILRRQEDFYPFLKDNREKIEKILTFRIPYYVGPLARGNSRFAWMTRKSEETITPWNFEEVVDKGASAQSFIERMTNFDKNLPNEKVLPKHSLLYEYFTVYNELTKVKYVTEGMRKPAFLSGEQKKAIVDLLFKTNRKVTVKQLKEDYFKKIECFDSVEISGVEDRFNASLGTYHDLLKIIKDKDFLDNEENEDILEDIVLTLTLFEDREMIEERLKTYAHLFDDKVMKQLKRRRYTGWGRLSRKLINGIRDKQSGKTILDFLKSDGFANRNFMQLIHDDSLTFKEDIQKAQVSGQGDSLHEHIANLAGSPAIKKGILQTVKVVDELVKVMGRHKPENIVIEMARENQTTQKGQKNSRERMKRIEEGIKELGSQILKEHPVENTQLQNEKLYLYYLQNGRDMYVDQELDINRLSDYDVDHIVPQSFLKDDSIDNKVLTRSDKNRGKSDNVPSEEVVKKMKNYWRQLLNAKLITQRKFDNLTKAERGGLSELDKAGFIKRQLVETRQITKHVAQILDSRMNTKYDENDKLIREVKVITLKSKLVSDFRKDFQFYKVREINNYHHAHDAYLNAVVGTALIKKYPKLESEFVYGDYKVYDVRKMIAKSEQEIGKATAKYFFYSNIMNFFKTEITLANGEIRKRPLIETNGETGEIVWDKGRDFATVRKVLSMPQVNIVKKTEVQTGGFSKESILPKRNSDKLIARKKDWDPKKYGGFVSPTVAYSVLVVAKVEKGKSKKLKSVKELLGITIMERSSFEKNPIDFLEAKGYKEVKKDLIIKLPKYSLFELENGRKRMLASARELQKGNELALPSKYVNFLYLASHYEKLKGSPEDNEQKQLFVEQHKHYLDEIIEQISEFSKRVILADANLDKVLSAYNKHRDKPIREQAENIIHLFTLTNLGAPAAFKYFDTTIDRKQYRSTKEVLDATLIHQSITGLYETRIDLSQLGGDEGADKRTADGSEFESPKKKRKV

SEQ ID NO: 355 - protein, 4 aa, synthetic construct
  REGION 1..4: note = synthetic peptide sequence
SGGS

SEQ ID NO: 356 - protein, 24 aa, synthetic construct
  REGION 1..24: note = synthetic peptide sequence
SGGSSGSETPGTSESATPESSGGS

SEQ ID NO: 357 - protein, 32 aa, synthetic construct
  REGION 1..32: note = synthetic polypeptide sequence
SGGSSGGSSGSETPGTSESATPESSGGSSGGS

SEQ ID NO: 358 - protein, 104 aa, synthetic construct
  REGION 1..104: note = synthetic polypeptide sequence
GGSGGSPGSPAGSPTSTEEGTSESATPESGPGTSTEPSEGSAPGSPAGSPTSTEEGTSTEPSEGSAPGTSTEPSEGSAPGTSESATPESGPGSEPATSGGSGGS

SEQ ID NO: 359 - protein, 24 aa, synthetic construct
  REGION 1..24: note = synthetic peptide sequence
SGGSSGGSSGSETPGTSESATPES

SEQ ID NO: 360 - protein, 40 aa, synthetic construct
  REGION 1..40: note = synthetic polypeptide sequence
SGGSSGGSSGSETPGTSESATPESSGGSSGGSSGGSSGGS

SEQ ID NO: 361 - protein, 64 aa, synthetic construct
  REGION 1..64: note = synthetic polypeptide sequence
SGGSSGGSSGSETPGTSESATPESSGGSSGGSSGGSSGGSSGSETPGTSESATPESSGGSSGGS

SEQ ID NO: 362 - protein, 92 aa, synthetic construct
  REGION 1..92: note = synthetic polypeptide sequence
PGSPAGSPTSTEEGTSESATPESGPGTSTEPSEGSAPGSPAGSPTSTEEGTSTEPSEGSAPGTSTEPSEGSAPGTSESATPESGPGSEPATS

SEQ ID NO: 363 - protein, 5 aa, synthetic construct
  REGION 1..5: note = synthetic peptide sequence
PAPAP

SEQ ID NO: 364 - protein, 6 aa, synthetic construct
  REGION 1..6: note = synthetic peptide sequence
PAPAPA

SEQ ID NO: 365 - protein, 7 aa, synthetic construct
  REGION 1..7: note = synthetic peptide sequence
PAPAPAP

SEQ ID NO: 366 - protein, 8 aa, synthetic construct
  REGION 1..8: note = synthetic peptide sequence
PAPAPAPA

SEQ ID NO: 367 - protein, 9 aa, synthetic construct
  REGION 1..9: note = synthetic peptide sequence
PAPAPAPAP

SEQ ID NO: 368 - protein, 15 aa, synthetic construct
  REGION 1..15: note = synthetic peptide sequence
PAPAPAPAPAPAPAP

SEQ ID NO: 369 - protein, 21 aa, synthetic construct
  REGION 1..21: note = synthetic peptide sequence
PAPAPAPAPAPAPAPAPAPAP

SEQ ID NO: 370 - DNA, 306 bp, synthetic construct
  misc_feature 1..306: note = DnaE Intein-N polynucleotide sequence
  source 1..306: mol_type = other DNA
tgcctgtcatacgaaaccgagatactgacagtagaatatggccttctgccaatcgggaagattgtggagaaacggatagaatgcacagtttactctgtcgataacaatggtaacatttatactcagccagttgcccagtggcacgaccggggagagcaggaagtattcgaatactgtctggaggatggaagtctcattagggccactaaggaccacaaatttatgacagtcgatggccagatgctgcctatagacgaaatctttgagcgagagttggacctcatgcgagttgacaaccttcctaat

SEQ ID NO: 371 - protein, 102 aa, synthetic construct
  REGION 1..102: note = DnaE Intein-N polypeptide sequence
CLSYETEILTVEYGLLPIGKIVEKRIECTVYSVDNNGNIYTQPVAQWHDRGEQEVFEYCLEDGSLIRATKDHKFMTVDGQMLPIDEIFERELDLMRVDNLPN

SEQ ID NO: 372 - DNA, 108 bp, synthetic construct
  misc_feature 1..108: note = DnaE Intein-C polynucleotide sequence
  source 1..108: mol_type = other DNA
atgatcaagatagctacaaggaagtatcttggcaaacaaaacgtttatgatattggagtcgaaagagatcacaactttgctctgaagaacggattcatagcttctaat

SEQ ID NO: 373 - protein, 36 aa, synthetic construct
  REGION 1..36: note = DnaE Intein-C polypeptide sequence
MIKIATRKYLGKQNVYDIGVERDHNFALKNGFIASN

SEQ ID NO: 374 - DNA, 303 bp, synthetic construct
  misc_feature 1..303: note = Cfa-N polynucleotide sequence
  source 1..303: mol_type = other DNA
tgcctgtcttatgataccgagatacttaccgttgaatatggcttcttgcctattggaaagattgtcgaagagagaattgaatgcacagtatatactgtagacaagaatggtttcgtttacacacagcccattgctcaatggcacaatcgcggcgaacaagaagtatttgagtactgtctcgaggatggaagcatcatacgagcaactaaagatcataaattcatgaccactgacgggcagatgttgccaatagatgagatattcgagcggggcttggatctcaaacaagtggatggattgcca

SEQ ID NO: 375 - protein, 101 aa, synthetic construct
  REGION 1..101: note = Cfa-N polypeptide sequence
CLSYDTEILTVEYGFLPIGKIVEERIECTVYTVDKNGFVYTQPIAQWHNRGEQEVFEYCLEDGSIIRATKDHKFMTTDGQMLPIDEIFERGLDLKQVDGLP

SEQ ID NO: 376 - DNA, 159 bp, synthetic construct
  misc_feature 1..159: note = Cfa-C polynucleotide sequence
  source 1..159: mol_type = other DNA
atgaagaggactgccgatggatcagagtttgaatctcccaagaagaagaggaaagtaaagataatatctcgaaaaagtcttggtacccaaaatgtctatgatattggagtggagaaagatcacaacttccttctcaagaacggtctcgtagccagcaac

SEQ ID NO: 377 - protein, 53 aa, synthetic construct
  REGION 1..53: note = Cfa-C polypeptide sequence
MKRTADGSEFESPKKKRKVKIISRKSLGTQNVYDIGVEKDHNFLLKNGLVASN

SEQ ID NO: 378 - protein, 1081 aa, Neisseria meningitidis
  REGION 1..1081: note = MISC_FEATURE - Nme3Cas9; WP_002217928.1 type II CRISPR RNA-guided endonuclease Cas9 [Neisseria meningitidis]
  REGION 1..1081: note = MISC_FEATURE - NCBI Reference: WP_002217928.1; type II CRISPR RNA-guided endonuclease Cas9; Nme3Cas9 polypeptide sequence
MAAFKPNPINYILGLDIGIASVGWAMVEIDEEENPIRLIDLGVRVFERAEVPKTGDSLAMARRLARSVRRLTRRRAHRLLRARRLLKREGVLQAADFDENGLIKSLPNTPWQLRAAALDRKLTPLEWSAVLLHLIKHRGYLSQRKNEGETADKELGALLKGVADNAHALQTGDFRTPAELALNKFEKECGHIRNQRGDYSHTFSRKDLQAELNLLFEKQKEFGNPHVSGGLKEGIETLLMTQRPALSGDAVQKMLGHCTFEPAEPKAAKNTYTAERFIWLTKLNNLRILEQGSERPLTDTERATLMDEPYRKSKLTYAQARKLLSLEDTAFFKGLRYGKDNAEASTLMEMKAYHTISRALEKEGLKDKKSPLNLSPELQDEIGTAFSLFKTDEDITGRLKDRIQPEILEALLKHISFDKFVQISLKALRRIVPLMEQGKRYDEACAEIYGDHYGKKNTEEKIYLPPIPADEIRNPVVLRALSQARKVINGVVRRYGSPARIHIETAREVGKSFKDRKEIEKRQEENRKDREKAAAKFREYFPNFVGEPKSKDILKLRLYEQQHGKCLYSGKEINLGRLNEKGYVEIDHALPFSRTWDDSFNNKVLVLGSENQNKGNQTPYEYFNGKDNSREWQEFKARVETSRFPRSKKQRILLQKFDEDGFKERNLNDTRYVNRFLCQFVADRMRLTGKGKKRVFASNGQITNLLRGFWGLRKVRAENDRHHALDAVVVACSTVAMQQKITRFVRYKEMNAFDGKTIDKETGEVLHQKTHFPQPWEFFAQEVMIRVFGKPDGKPEFEEADTPEKLRTLLAEKLSSRPEAVHEYVTPLFVSRAPNRKMSGQGHMETVKSAKRLDEGVSVLRVPLTQLKLKDLEKMVNREREPKLYEALKARLEAHKDDPAKAFAEPFYKYDKAGNRTQQVKAVRVEQVQKTGVWVRNHNGIADNATMVRVDVFEKGDKYYLVPIYSWQVAKGILPDRAVVAYADEEDWTVIDESFRFKFVLYSNDLIKVQLKKDSFLGYFSGLDRATGAISLREHDLEKSKGKDGMHRIGVKTALSFQKYQIDEMGKEIRPCRLKKRPPVR

SEQ ID NO: 379 - RNA, 66 nt, synthetic construct
  misc_feature 1..66: note = Telomerase Ku Binding Motif oligonucleotide sequence
  source 1..66: mol_type = other RNA
ttcttgtcgtacttatagatcgctacgttatttcaattttgaaaatctgagtcctgggagtgcgga

SEQ ID NO: 380 - protein, 1094 aa, synthetic construct
  REGION 1..1094: note = Telomerase Ku Heterodimer polypeptide sequence
MSGWESYYKTEGDEEAEEEQEENLEASGDYKYSGRDSLIFLVDASKAMFESQSEDELTPFDMSIQCIQSVYISKIISSDRDLLAVVFYGTEKDKNSVNFKNIYVLQELDNPGAKRILELDQFKGQQGQKRFQDMMGHGSDYSLSEVLWVCANLFSDVQFKMSHKRIMLFTNEDNPHGNDSAKASRARTKAGDLRDTGIFLDLMHLKKPGGFDISLFYRDIISIAEDEDLRVHFEESSKLEDLLRKVRAKETRKRALSRLKLKLNKDIVISVGIYNLVQKALKPPPIKLYRETNEPVKTKTRTFNTSTGGLLLPSDTKRSQIYGSRQIILEKEETEELKRFDDPGLMLMGFKPLVLLKKHHYLRPSLFVYPEESLVIGSSTLFSALLIKCLEKEVAALCRYTPRRNIPPYFVALVPQEEELDDQKIQVTPPGFQLVFLPFADDKRKMPFTEKIMATPEQVGKMKAIVEKLRFTYRSDSFENPVLQQHFRNLEALALDLMEPEQAVDLTLPKVEAMNKRLGSLVDEFKELVYPPDYNPEGKVTKRKHDNEGSGSKRPKVEYSEEELKTHISKGTLGKFTVPMLKEACRAYGLKSGLKKQELLEALTKHFQDMVRSGNKAAVVLCMDVGFTMSNSIPGIESPFEQAKKVITMFVQRQVFAENKDEIALVLFGTDGTDNPLSGGDQYQNITVHRHLMLPDFDLLEDIESKIQPGSQQADFLDALIVSMDVIQHETIGKKFEKRHIEIFTDLSSRFSKSQLDIIIHSLKKCDISERHSIHWPCRLTIGSNLSIRIAAYKSILQERVKKTWTVVDAKTLKKEDIQKETVYCLNDDDETEVLKEDIIQGFRYGSDIVPFSKVDEEQMKYKSEGKCFSVLGFCKSSQVQRRFFMGNQVLKVFAARDDEAAAVALSSLIHALDDLDMVAIVRYAYDKRANPQVGVAFPHIKHNYECLVYVQLPFMEDLRQYMFSSLKNSKKYAPTEAQLNAVDALIDSMSLAKKDEKTDTLEDLFPTTKIPNPRFQRLFQCLLHRALHPREPLPPIQQHIWNMLNPPAEVTTKSQIPLSKIKTLFPLIEAKKKDQVTAQEIFQDNHEDGPTAK

SEQ ID NO: 381 - RNA, 10 nt, synthetic construct
  misc_feature 1..10: note = Telomerase Sm7 consensus site(single stranded) oligonucleotide sequence
  source 1..10: mol_type = other RNA
aatttttgga

SEQ ID NO: 382 - protein, 83 aa, synthetic construct
  REGION 1..83: note = MS2 coat protein polypeptide sequence
GSVIDVSSQRVNVQRPLDALGNSLNSPVIIKLKGDREFRGVLKSFDLHMNLVLNDAEELEDGEVTRRLGTVLIRGDNIVYISP

SEQ ID NO: 383 - RNA, 26 nt, synthetic construct
  misc_feature 1..26: note = PP7 phage operator stem loop oligonucleotide sequence
  source 1..26: mol_type = other RNA
ataaggagtttatatggaaaccctta

SEQ ID NO: 384 - protein, 128 aa, synthetic construct
  REGION 1..128: note = PP7 coat protein (PCP)polypeptide sequence
MSKTIVLSVGEATRTLTEIQSTADRQIFEEKVGPLVGRLRLTASLRQNGAKTAYRVNLKLDQADVVDCSTSVCGELPKVRYTQVWSHDVTIVANSTEASRKSLYDLTKSLVATSQVEDLVVNLVPLGR

SEQ ID NO: 385 - RNA, 19 nt, synthetic construct
  misc_feature 1..19: note = SfMu Com stem loop oligonucleotide sequence
  source 1..19: mol_type = other RNA
ctgaatgcctgcgagcatc

SEQ ID NO: 386 - protein, 62 aa, synthetic construct
  REGION 1..62: note = SfMu Com binding protein polypeptide sequence
MKSIRCKNCNKLLFKADSFDHIEIRCPRCKRHIIMLNACEHPTEKHCGKREKITHSDETVRY

SEQ ID NO: 387 - protein, 47 aa, synthetic construct
  REGION 1..47: note = leucine zipper polypeptide sequence
LEIRAAFLRQRNTALRTEVAELEQEVQRLENEVSQYETRYGPLGGGK

SEQ ID NO: 388 - protein, 47 aa, synthetic construct
  REGION 1..47: note = leucine zipper polypeptide sequence
LEIEAAFLERENTALETRVAELRQRVQRLRNRVSQYRTRYGPLGGGK

SEQ ID NO: 389 - DNA, 303 bp, synthetic construct
  source 1..303: mol_type = other DNA
tgcctgagctacgataccgagatcctgaccgtggaatacggcttcctgcctatcggcaagatcgtcgaggaacggatcgagtgcacagtgtacaccgtggataagaatggcttcgtgtacacccagcctatcgctcagtggcacaacagaggcgagcaagaggtgttcgagtactgcctggaagatggcagcatcatccgggccaccaaggaccacaagtttatgaccaccgacggccagatgctgcccatcgacgagatctttgagagaggcctggacctgaaacaggtggacggactgcct

SEQ ID NO: 390 - protein, 101 aa, synthetic construct; identical to SEQ ID NO: 375

SEQ ID NO: 391 - DNA, 264 bp, synthetic construct
  source 1..264: mol_type = other DNA
tgtctggacctcaagacccaagtgcagacacctcagggcatgaaagagattagcaatatccaggtgggcgacctggtcctgagcaacaccggctacaacgaggtgctgaacgtgttccctaagtccaagaagaaatcttataagatcaccctggaagatggcaaggaaatcatctgcagcgaggaacacctgttccccacccagaccggcgagatgaacatcagcggcggactgaaggagggcatgtgcctgtacgtgaaggag

SEQ ID NO: 392 - protein, 88 aa, synthetic construct
CLDLKTQVQTPQGMKEISNIQVGDLVLSNTGYNEVLNVFPKSKKKSYKITLEDGKEIICSEEHLFPTQTGEMNISGGLKEGMCLYVKE

SEQ ID NO: 393 - DNA, 267 bp, synthetic construct
  source 1..267: mol_type = other DNA
tgcctgagcctggacaccatggtggtgacaaacggcaaggccatcgagatcagagatgtgaaggtgggagattggctggaaagcgaatgtggcccagtgcaggttacagaggtgctgcctatcatcaagcagcctgtctttgagattgtgctgaaaagcggaaaaaagatccgggtgtccgctaatcacaagttccccaccaaggacggcctcaagaccatcaacagcggcctgaaggtgggcgacttcctgagaagcagagccaag

SEQ ID NO: 394 - protein, 89 aa, synthetic construct
CLSLDTMVVTNGKAIEIRDVKVGDWLESECGPVQVTEVLPIIKQPVFEIVLKSGKKIRVSANHKFPTKDGLKTINSGLKVGDFLRSRAK

SEQ ID NO: 395 - DNA, 303 bp, synthetic construct
  source 1..303: mol_type = other DNA
tgttttgtgcctggcaccctggtgaacacagagaatggcctgaagaaaatcgaggaaatcaaggtgggcgacaaggtgttcagccatacaggcaagctgcaggaggtggtggacaccctgatcttcgaccgggacgaggaaatcatctctatcaacggcattgattgcaccaagaaccacgagttctacgtgatcgataaggaaaacgctaatagagtgaacgaggacaacatccacctcttcgccagatgggtccacgccgaggaactggatatgaaaaagcacctgctgatcgagctggaa

SEQ ID NO: 396 - protein, 101 aa, synthetic construct
CFVPGTLVNTENGLKKIEEIKVGDKVFSHTGKLQEVVDTLIFDRDEEIISINGIDCTKNHEFYVIDKENANRVNEDNIHLFARWVHAEELDMKKHLLIELE

SEQ ID NO: 397 - DNA, 315 bp, synthetic construct
  source 1..315: mol_type = other DNA
tgcctggtgggctctagcgagattatcacaagaaactacggcaagaccaccatcaaggaagtggtcgagatcttcgacaacgacaagaatatccaggtgctggccttcaacacccacaccgataatatcgagtgggcccctatcaaggccgctcagctgaccagacctaacgccgagctggttgaactggaaatcgacaccctgcacggcgtgaaaacaatccggtgcacccctgaccaccccgtgtacaccaagaacagaggctacgtgcgggccgacgagctgacagatgatgacgagctcgtggtggctatc

SEQ ID NO: 398 - protein, 105 aa, synthetic construct
CLVGSSEIITRNYGKTTIKEVVEIFDNDKNIQVLAFNTHTDNIEWAPIKAAQLTRPNAELVELEIDTLHGVKTIRCTPDHPVYTKNRGYVRADELTDDDELVVAI

SEQ ID NO: 399 - DNA, 306 bp, synthetic construct
  source 1..306: mol_type = other DNA
tgcctgagctacgagacagagatcctgaccgtggaatatggcctgctgccaatcggaaagatcgtggaaaagcggatcgagtgcaccgtctacagcgtggacaacaacggaaatatctatacacagcctgtggcccaatggcacgaccggggcgaacaggaggtgtttgagtactgcctggaagatggttctctgattagagccaccaaggaccacaagttcatgaccgtcgacggccagatgctgcccatcgacgaaatcttcgagcgggaactcgacctgatgagagtggataacctgcccaat

SEQ ID NO: 400 - protein, 102 aa, synthetic construct; identical to SEQ ID NO: 371

SEQ ID NO: 401 - protein, 101 aa, synthetic construct; identical to SEQ ID NO: 375

SEQ ID NO: 402 - protein, 102 aa, synthetic construct; identical to SEQ ID NO: 371

SEQ ID NO: 403 - RNA, 20 nt, synthetic construct
  source 1..20: mol_type = other RNA
cctgcagccccgcgtccagc

SEQ ID NO: 404 - RNA, 20 nt, synthetic construct
  source 1..20: mol_type = other RNA
cgcgtccagctggatgagcg

SEQ ID NO: 405 - RNA, 20 nt, synthetic construct
  source 1..20: mol_type = other RNA
tgggccaggcctcgagtatg

SEQ ID NO: 406 - RNA, 20 nt, synthetic construct
  source 1..20: mol_type = other RNA
gggagttacccagaacagtg

SEQ ID NO: 407 - RNA, 20 nt, synthetic construct
  source 1..20: mol_type = other RNA
cctgccccaagtcagcccca

SEQ ID NO: 408 - RNA, 20 nt, synthetic construct
  source 1..20: mol_type = other RNA
gccagggccgagtccctgtc

SEQ ID NO: 409 - RNA, 20 nt, synthetic construct
  source 1..20: mol_type = other RNA
ccagggccgagtccctgtcc

SEQ ID NO: 410 - RNA, 20 nt, synthetic construct
  source 1..20: mol_type = other RNA
gccccagggcccagagtcca

SEQ ID NO: 411 - RNA, 20 nt, synthetic construct
  source 1..20: mol_type = other RNA
atgtgagccaggcccaggct

SEQ ID NO: 412 - RNA, 20 nt, synthetic construct
  source 1..20: mol_type = other RNA
gaggagtccacttggcagtg

SEQ ID NO: 413 - DNA, 279 bp, synthetic construct
  source 1..279: mol_type = other DNA
acaagaagcggatactgtctggacctcaagacccaagtgcagacacctcagggcatgaaagagattagcaatatccaggtgggcgacctggtcctgagcaacaccggctacaacgaggtgctgaacgtgttccctaagtccaagaagaaatcttataagatcaccctggaagatggcaaggaaatcatctgcagcgaggaacacctgttccccacccagaccggcgagatgaacatcagcggcggactgaaggagggcatgtgcctgtacgtgaaggag

SEQ ID NO: 414 - protein, 93 aa, synthetic construct
TRSGYCLDLKTQVQTPQGMKEISNIQVGDLVLSNTGYNEVLNVFPKSKKKSYKITLEDGKEIICSEEHLFPTQTGEMNISGGLKEGMCLYVKE

SEQ ID NO: 415 - DNA, 282 bp, synthetic construct
  source 1..282: mol_type = other DNA
tctcagctgaaccggtgcctgagcctggacaccatggtggtgacaaacggcaaggccatcgagatcagagatgtgaaggtgggagattggctggaaagcgaatgtggcccagtgcaggttacagaggtgctgcctatcatcaagcagcctgtctttgagattgtgctgaaaagcggaaaaaagatccgggtgtccgctaatcacaagttccccaccaaggacggcctcaagaccatcaacagcggcctgaaggtgggcgacttcctgagaagcagagccaag

SEQ ID NO: 416 - protein, 94 aa, synthetic construct
SQLNRCLSLDTMVVTNGKAIEIRDVKVGDWLESECGPVQVTEVLPIIKQPVFEIVLKSGKKIRVSANHKFPTKDGLKTINSGLKVGDFLRSRAK

SEQ ID NO: 417 - DNA, 318 bp, synthetic construct
  source 1..318: mol_type = other DNA
ggcatcggcggaggatgttttgtgcctggcaccctggtgaacacagagaatggcctgaagaaaatcgaggaaatcaaggtgggcgacaaggtgttcagccatacaggcaagctgcaggaggtggtggacaccctgatcttcgaccgggacgaggaaatcatctctatcaacggcattgattgcaccaagaaccacgagttctacgtgatcgataaggaaaacgctaatagagtgaacgaggacaacatccacctcttcgccagatgggtccacgccgaggaactggatatgaaaaagcacctgctgatcgagctggaa

SEQ ID NO: 418 - protein, 106 aa, synthetic construct
GIGGGCFVPGTLVNTENGLKKIEEIKVGDKVFSHTGKLQEVVDTLIFDRDEEIISINGIDCTKNHEFYVIDKENANRVNEDNIHLFARWVHAEELDMKKHLLIELE

SEQ ID NO: 419 - DNA, 330 bp, synthetic construct
  source 1..330: mol_type = other DNA
ggaacaaacccatgttgcctggtgggctctagcgagattatcacaagaaactacggcaagaccaccatcaaggaagtggtcgagatcttcgacaacgacaagaatatccaggtgctggccttcaacacccacaccgataatatcgagtgggcccctatcaaggccgctcagctgaccagacctaacgccgagctggttgaactggaaatcgacaccctgcacggcgtgaaaacaatccggtgcacccctgaccaccccgtgtacaccaagaacagaggctacgtgcgggccgacgagctgacagatgatgacgagctcgtggtggctatc

SEQ ID NO: 420 - protein, 110 aa, synthetic construct
GTNPCCLVGSSEIITRNYGKTTIKEVVEIFDNDKNIQVLAFNTHTDNIEWAPIKAAQLTRPNAELVELEIDTLHGVKTIRCTPDHPVYTKNRGYVRADELTDDDELVVAI

SEQ ID NO: 421 - DNA, 105 bp, synthetic construct
  source 1..105: mol_type = other DNA
gtcaagatcatcagcagaaagagcctgggcacccagaacgtgtacgatatcggagtgggcgagccccacaactttctgctcaagaatggcctggtggccagcaac

SEQ ID NO: 422 - protein, 35 aa, synthetic construct
VKIISRKSLGTQNVYDIGVGEPHNFLLKNGLVASN

SEQ ID NO: 423 - DNA, 114 bp, synthetic construct
  source 1..114: mol_type = other DNA
atgatgctgaaaaagatcctgaagatcgaggaactggatgagagagagctgatcgacatcgaagtgtctggcaatcacctgttctacgccaacgacatcctgacccacaacagc

SEQ ID NO: 424 - protein, 38 aa, synthetic construct
MMLKKILKIEELDERELIDIEVSGNHLFYANDILTHNS

SEQ ID NO: 425 - DNA, 138 bp, synthetic construct
  source 1..138: mol_type = other DNA
atgtgcgaaatcttcgagaacgagattgattgggacgaaatcgcctctatcgagtacgtgggcgtggaagagacaatcgacatcaacgtgaccaacgacagactgtttttcgccaatggcatcctgacccacaacagc

SEQ ID NO: 426 - protein, 46 aa, synthetic construct
MCEIFENEIDWDEIASIEYVGVEETIDINVTNDRLFFANGILTHNS

SEQ ID NO: 427 - DNA, 123 bp, synthetic construct
  source 1..123: mol_type = other DNA
atgaaattcaagctgaaggaaatcaccagcatcgagacaaagcactacaagggcaaggtgcacgatctgaccgtgaaccaggaccacagctacaacgtcagaggcaccgtggtgcataattct

SEQ ID NO: 428 - protein, 41 aa, synthetic construct
MKFKLKEITSIETKHYKGKVHDLTVNQDHSYNVRGTVVHNS

SEQ ID NO: 429 - DNA, 123 bp, synthetic construct
  source 1..123: mol_type = other DNA
atggaagccaagacctacatcggcaagctgaaatctagaaagatcgtgtccaacgaggatacatacgacatccagaccagcacccacaatttcttcgccaacgacatcctggtgcacaacagc

SEQ ID NO: 430 - protein, 41 aa, synthetic construct
MEAKTYIGKLKSRKIVSNEDTYDIQTSTHNFFANDILVHNS

SEQ ID NO: 431 - DNA, 108 bp, synthetic construct
  source 1..108: mol_type = other DNA
atgatcaagatcgccacaagaaagtacctgggcaagcagaacgtgtacgacatcggcgtggagagagaccacaacttcgccctgaagaacggctttatcgcctctaat

SEQ ID NO: 432 - protein, 36 aa, synthetic construct; identical to SEQ ID NO: 373

SEQ ID NO: 433 - protein, 36 aa, synthetic construct
MVKIISRKSLGTQNVYDIGVGEPHNFLLKNGLVASN

SEQ ID NO: 434 - protein, 35 aa, synthetic construct
IKIATRKYLGKQNVYDIGVERDHNFALKNGFIASN

SEQ ID NO: 435 - RNA, 20 nt, synthetic construct
  source 1..20: mol_type = other RNA
gagtcactgaaaagagtaga

SEQ ID NO: 436 - RNA, 20 nt, synthetic construct
  source 1..20: mol_type = other RNA
ctggacaagaacgctttgtg

SEQ ID NO: 437 - RNA, 20 nt, synthetic construct
  source 1..20: mol_type = other RNA
ccatcccagaggagtttctc

SEQ ID NO: 438 - RNA, 20 nt, synthetic construct
  source 1..20: mol_type = other RNA
tggcaatgccagctgtacca

SEQ ID NO: 439 - RNA, 20 nt, synthetic construct
  source 1..20: mol_type = other RNA
taccagggggagaggcttct

SEQ ID NO: 440 - RNA, 20 nt, synthetic construct
  source 1..20: mol_type = other RNA
ggcattgccaaggctgggaa

SEQ ID NO: 441 - RNA, 20 nt, synthetic construct
  source 1..20: mol_type = other RNA
ggcacctatggagaaagtac

SEQ ID NO: 442 - RNA, 20 nt, synthetic construct
  source 1..20: mol_type = other RNA
agacaggtgagccagggaca

SEQ ID NO: 443 - RNA, 20 nt, synthetic construct
  source 1..20: mol_type = other RNA
ggctcacctgtcttctccaa

SEQ ID NO: 444 - RNA, 20 nt, synthetic construct
  source 1..20: mol_type = other RNA
gtcgccactgtgagaagaga

SEQ ID NO: 445 - RNA, 20 nt, synthetic construct
  source 1..20: mol_type = other RNA
gcaggctcagagcaagatag

SEQ ID NO: 446 - RNA, 20 nt, synthetic construct
  source 1..20: mol_type = other RNA
gctggagcaagaaccggagc

SEQ ID NO: 447 - RNA, 21 nt, synthetic construct
  source 1..21: mol_type = other RNA
tccttaccccatctcagggtg

SEQ ID NO: 448 - RNA, 22 nt, synthetic construct
  source 1..22: mol_type = other RNA
ctccttaccccatctcagggtg

SEQ ID NO: 449 - RNA, 19 nt, synthetic construct
  source 1..19: mol_type = other RNA
cttaccccatctcagggtg

SEQ ID NO: 450 - RNA, 18 nt, synthetic construct
  source 1..18: mol_type = other RNA
ttaccccatctcagggtg

SEQ ID NO: 451 - RNA, 21 nt, synthetic construct
  source 1..21: mol_type = other RNA
ccttaccccatctcagggtga

SEQ ID NO: 452 - RNA, 22 nt, synthetic construct
  source 1..22: mol_type = other RNA
tcaccctgagatggggtaagga

SEQ ID NO: 453 - RNA, 19 nt, synthetic construct
  source 1..19: mol_type = other RNA
ttaccccatctcagggtga

SEQ ID NO: 454 - RNA, 18 nt, synthetic construct
  source 1..18: mol_type = other RNA
taccccatctcagggtga

SEQ ID NO: 455 - protein, 119 aa, Homo sapiens
MSRSVALAVLALLSLSGLEAIQRTPKIQVYSRHPAENGKSNFLNCYVSGFHPSDIEVDLLKNGERIEKVEHSDLSFSKDWSFYLLYYTEFTPTEKDEYACRVNHVTLSQPKIVKWDRDM

SEQ ID NO: 456 - DNA, 9199 bp, Homo sapiens
  source 1..9199: mol_type = genomic DNA
catgtcataaatggtaagtccaagaaaaatacaggtattcccccccaaagaaaactgtaaaatcgacttttttctatctgtactgttttttattggtttttaaattggttttccaagtgagtaaatcagaatctatctgtaatggattttaaatttagtgtttctctgtgatgtagtaaacaagaaactagaggcaaaaatagccctgtcccttgctaaacttctaaggcacttttctagtacaactcaacactaacatttcaggcctttagtgccttatatgagtttttaaaagggggaaaagggagggagcaagagtgtcttaactcatacatttaggcataacaattattctcatattttagttattgagagggctggtagaaaaactaggtaaataatattaataattatagcgcttattaaacactacagaacacttactatgtaccaggcattgtgggaggctctctcttgtgcattatctcatttcattaggtccatggagagtattgcattttcttagtttaggcatggcctccacaataaagattatcaaaagcctaaaaatatgtaaaagaaacctagaagttatttgttgtgctccttggggaagctaggcaaatcctttcaactgaaaaccatggtgacttccaagatctctgcccctccccatcgccatggtccacttcctcttctcactgttcctcttagaaaagatctgtggactccaccaccacgaaatggcggcaccttatttatggtcactttagagggtaggttttcttaatgggtctgcctgtcatgtttaacgtccttggctgggtccaaggcagatgcagtccaaactctcactaaaattgccgagccctttgtcttccagtgtctaaaatattaatgtcaatggaatcaggccagagtttgaattctagtctcttagcctttgtttcccctgtccataaaatgaatgggggtaattctttcctcctacagtttatttatatattcactaattcattcattcatccatccattcgttcattcggtttactgagtacctactatgtgccagcccctgttctagggtggaaactaagagaatgatgtacctagagggcgctggaagctctaaagccctagcagttactgcttttactattagtggtcgtttttttctcccccccgccccccgacaaatcaacagaacaaagaaaattacctaaacagcaaggacatagggaggaacttcttggcacagaactttccaaacactttttcctgaagggatacaagaagcaagaaaggtactctttcactaggaccttctctgagctgtcctcaggatgcttttgggactatttttcttacccagagaatggagaaaccctgcagggaattcccaagctgtagttataaacagaagttctccttctgctaggtagcattcaaagatcttaatcttctgggtttccgttttctcgaatgaaaaatgcaggtccgagcagttaactggctggggcaccattagcaagtcacttagcatctctggggccagtctgcaaagcgagggggcagccttaatgtgcctccagcctgaagtcctagaatgagcgcccggtgtcccaagctggggcgcgcaccccagatcggagggcgccgatgtacagacagcaaactcacccagtctagtgcatgccttcttaaacatcacgagactctaagaaaaggaaactgaaaacgggaaagtccctctctctaacctggcactgcgtcgctggcttggagacaggtgacggtccctgcgggccttgtcctgattggctgggcacgcgtttaatataagtggaggcgtcgcgctggcgggcattcctgaagctgacagcattcgggccgagatgtctcgctccgtggccttagctgtgctcgcgctactctctctttctggcctggaggctatccagcgtgagtctctcctaccctcccgctctggtccttcctctcccgctctgcaccctctgtggccctcgctgtgctctctcgctccgtgacttcccttctccaagttctccttggtggcccgccgtggggctagtccagggctggatctcggggaagcggcggggtggcctgggagtggggaagggggtgcgcacccgggacgcgcgctacttgcccctttcggcggggagcaggggagacctttggcctacggcgacgggagggtcgggacaaagtttagggcgtcgataagcgtcagagcgccgaggttgggggagggtttctcttccgctctttcgcggggcctctggctcccccagcgcagctggagtgggggacgggtaggctcgtcccaaaggcgcggcgctgaggtttgtgaacgcgtggaggggcgcttggggtctgggggaggcgtcgcccgggtaagcctgtctgctgcggctctgcttcccttagactggagagctgtggacttcgtctaggcgcccgctaagttcgcatgtcctagcacctctgggtctatgtggggccacaccgtggggaggaaacagcacgcgacgtttgtagaatgcttggctgtgatacaaagcggtttcgaataattaacttatttgttcccatcacatgtcacttttaaaaaattataagaactacccgttattgacatctttctgtgtgccaaggactttatgtgctttgcgtcatttaattttgaaaacagttatcttccgccatagataactactatggttatcttctgcctctcacagatgaagaaactaaggcaccgagattttaagaaacttaattacacaggggataaatggcagcaatcgagattgaagtcaagcctaaccagggcttttgcgggagcgcatgccttttggctgtaattcgtgcatttttttttaagaaaaacgcctgccttctgcgtgagattctccagagcaaactgggcggcatgggccctgtggtcttttcgtacagagggcttcctctttggctctttgcctggttgtttccaagatgtactgtgcctcttactttcggttttgaaaacatgagggggttgggcgtggtagcttacgcctgtaatcccagcacttagggaggccgaggcgggaggatggcttgaggtccgtagttgagaccagcctggccaacatggtgaagcctggtctctacaaaaaataataacaaaaattagccgggtgtggtggctcgtgcctgtggtcccagctgctccggtggctgaggcgggaggatctcttgagcttaggcttttgagctatcatggcgccagtgcactccagcgtgggcaacagagcgagaccctgtctctcaaaaaagaaaaaaaaaaaaaaagaaagagaaaagaaaagaaagaaagaagtgaaggtttgtcagtcaggggagctgtaaaaccattaataaagataatccaagatggttaccaagactgttgaggacgccagagatcttgagcactttctaagtacctggcaatacactaagcgcgctcaccttttcctctggcaaaacatgatcgaaagcagaatgttttgatcatgagaaaattgcatttaatttgaatacaatttatttacaacataaaggataatgtatatatcaccaccattactggtatttgctggttatgttagatgtcattttaaaaaataacaatctgatatttaaaaaaaaatcttattttgaaaatttccaaagtaatacatgccatgcatagaccatttctggaagataccacaagaaacatgtaatgatgattgcctctgaaggtctattttcctcctctgacctgtgtgtgggttttgtttttgttttactgtgggcataaattaatttttcagttaagttttggaagcttaaataactctccaaaagtcataaagccagtaactggttgagcccaaattcaaacccagcctgtctgatacttgtcctcttcttagaaaagattacagtgatgctctcacaaaatcttgccgccttccctcaaacagagagttccaggcaggatgaatctgtgctctgatccctgaggcatttaatatgttcttattattagaagctcagatgcaaagagctctcttagcttttaatgttatgaaaaaaatcaggtcttcattagattccccaatccacctcttgatggggctagtagcctttccttaatgatagggtgtttctagagagatatatctggtcaaggtggcctggtactcctccttctccccacagcctcccagacaaggaggagtagctgccttttagtgatcatgtaccctgaatataagtgtatttaaaagaattttatacacatatatttagtgtcaatctgtatatttagtagcactaacacttctcttcattttcaatgaaaaatatagagtttataatattttcttcccacttccccatggatggtctagtcatgcctctcattttggaaagtactgtttctgaaacattaggcaatatattcccaacctggctagtttacagcaatcacctgtggatgctaattaaaacgcaaatcccactgtcacatgcattactccatttgatcataatggaaagtatgttctgtcccatttgccatagtcctcacctatccctgttgtattttatcgggtccaactcaaccatttaaggtatttgccagctcttgtatgcatttaggttttgtttctttgttttttagctcatgaaattaggtacaaagtcagagaggggtctggcatataaaacctcagcagaaataaagaggttttgttgtttggtaagaacataccttgggttggttgggcacggtggctcgtgcctgtaatcccaacactttgggaggccaaggcaggctgatcacttgaagttgggagttcaagaccagcctggccaacatggtgaaatcccgtctctactgaaaatacaaaaattaaccaggcatggtggtgtgtgcctgtagtcccaggaatcacttgaacccaggaggcggaggttgcagtgagctgagatctcaccactgcacactgcactccagcctgggcaatggaatgagattccatcccaaaaaataaaaaaataaaaaaataaagaacataccttgggttgatccacttaggaacctcagataataacatctgccacgtatagagcaattgctatgtcccaggcactctactagacacttcatacagtttagaaaatcagatgggtgtagatcaaggcaggagcaggaaccaaaaagaaaggcataaacataagaaaaaaaatggaaggggtggaaacagagtacaataacatgagtaatttgatgggggctattatgaactgagaaatgaactttgaaaagtatcttggggccaaatcatgtagactcttgagtgatgtgttaaggaatgctatgagtgctgagagggcatcagaagtccttgagagcctccagagaaaggctcttaaaaatgcagcgcaatctccagtgacagaagatactgctagaaatctgctagaaaaaaaacaaaaaaggcatgtatagaggaattatgagggaaagataccaagtcacggtttattcttcaaaatggaggtggcttgttgggaaggtggaagctcatttggccagagtggaaatggaattgggagaaatcgatgaccaaatgtaaacacttggtgcctgatatagcttgacaccaagttagccccaagtgaaataccctggcaatattaatgtgtcttttcccgatattcctcaggtactccaaagattcaggtttactcacgtcatccagcagagaatggaaagtcaaatttcctgaattgctatgtgtctgggtttcatccatccgacattgaagttgacttactgaagaatggagagagaattgaaaaagtggagcattcagacttgtctttcagcaaggactggtctttctatctcttgtactacactgaattcacccccactgaaaaagatgagtatgcctgccgtgtgaaccatgtgactttgtcacagcccaagatagttaagtggggtaagtcttacattcttttgtaagctgctgaaagttgtgtatgagtagtcatatcataaagctgctttgatataaaaaaggtctatggccatactaccctgaatgagtcccatcccatctgatataaacaatctgcatattgggattgtcagggaatgttcttaaagatcagattagtggcacctgctgagatactgatgcacagcatggtttctgaaccagtagtttccctgcagttgagcagggagcagcagcagcacttgcacaaatacatatacactcttaacacttcttacctactggcttcctctagcttttgtggcagcttcaggtatatttagcactgaacgaacatctcaagaaggtataggcctttgtttgtaagtcctgctgtcctagcatcctataatcctggacttctccagtactttctggctggattggtatctgaggctagtaggaagggcttgttcctgctgggtagctctaaacaatgtattcatgggtaggaacagcagcctattctgccagccttatttctaaccattttagacatttgttagtacatggtattttaaaagtaaaacttaatgtcttccttttttttctccactgtctttttcatagatcgagacatgtaagcagcatcatggaggtaagtttttgaccttgagaaaatgtttttgtttcactgtcctgaggactatttatagacagctctaacatgataaccctcactatgtggagaacattgacagagtaacattttagcagggaaagaagaatcctacagggtcatgttcccttctcctgtggagtggcatgaagaaggtgtatggccccaggtatggccatattactgaccctctacagagagggcaaaggaactgccagtatggtattgcaggataaaggcaggtggttacccacattacctgcaaggctttgatctttcttctgccatttccacattggacatctctgctgaggagagaaaatgaaccactcttttcctttgtataatgttgttttattcttcagacagaagagaggagttatacagctctgcagacatcccattcctgtatggggactgtgtttgcctcttagaggttcccaggccactagaggagataaagggaaacagattgttataacttgatataatgatactataatagatgtaactacaaggagctccagaagcaagagagagggaggaacttggacttctctgcatctttagttggagtccaaaggcttttcaatgaaattctactgcccagggtacattgatgctgaaaccccattcaaatctcctgttatattctagaacagggaattgatttgggagagcatcaggaaggtggatgatctgcccagtcacactgttagtaaattgtagagccaggacctgaactctaatatagtcatgtgttacttaatgacggggacatgttctgagaaatgcttacacaaacctaggtgttgtagcctactacacgcataggctacatggtatagcctattgctcctagactacaaacctgtacagcctgttactgtactgaatactgtgggcagttgtaacacaatggtaagtatttgtgtatctaaacatagaagttgcagtaaaaatatgctattttaatcttatgagaccactgtcatatatacagtccatcattgaccaaaacatcatatcagcattttttcttctaagattttgggagcaccaaagggatacactaacaggatatactctttataatgggtttggagaactgtctgcagctacttcttttaaaaaggtgatctacacagtagaaattagacaagtttggtaatgagatctgcaatccaaataaaataaattcattgctaacctttttcttttcttttcaggtttgaagatgccgcatttggattggatgaattccaaattctgcttgcttgctttttaatattgatatgcttatacacttacactttatgcacaaaatgtagggttataataatgttaacatggacatgatcttctttataattctactttgagtgctgtctccatgtttgatgtatctgagcaggttgctccacaggtagctctaggagggctggcaacttagaggtggggagcagagaattctcttatccaacatcaacatcttggtcagatttgaactcttcaatctcttgcactcaaagcttgttaagatagttaagcgtgcataagttaacttccaatttacatactctgcttagaatttgggggaaaatttagaaatataattgacaggattattggaaatttgttataatgaatgaaacattttgtcatataagattcatatttacttcttatacatttgataaagtaaggcatggttgtggttaatctggtttatttttgttccacaagttaaataaatcataaaacttgatgtgttatctcttatatctcactcccactattacccctttattttcaaacagggaaacagtcttcaagttccacttggtaaaaaatgtgaaccccttgtatatagagtttggctcacagtgtaaagggcctcagtgattcacattttccagattaggaatctgatgctcaaagaagttaaatggcatagttggggtgacacagctgtctagtgggaggccagccttctatattttagccagcgttctttcctgcgggccaggtcatgaggagtatgcagactctaagagggagcaaaagtatctgaaggatttaatattttagcaaggaatagatatacaatcatcccttggtctccctgggggattggtttcaggaccccttcttggacaccaaatctatggatatttaagtcccttctataaaatggtatagtatttgcatataacctatccacatcctcctgtatactttaaatcatttctagattacttgtaatacctaatacaatgtaaatgctatgcaaatagttgttattgtttaaggaataatgacaagaaaaaaaagtctgtacatgctcagtaaagacacaaccatccctttttttccccagtgtttttgatccatggtttgctgaatccacagatgtggagcccctggatacggaaggcccgctgtactttgaatgacaaataacagatttaaa

SEQ ID NO: 457 - protein, 1131 aa, Homo sapiens
MRCLAPRPAGSYLSEPQGSSQCATMELGPLEGGYLELLNSDADPLCLYHFYDQMDLAGEEEIELYSEPDTDTINCDQFSRLLCDMEGDEETREAYANIAELDQYVFQDSQLEGLSKDIFIEHIGPDEVIGESMEMPAEVGQKSQKRPFPEELPADLKHWKPAEPPTVVTGSLLVGPVSDCSTLPCLPLPALFNQEPASGQMRLEKTDQIPMPFSSSSLSCLNLPEGPIQFVPTISTLPHGLWQISEAGTGVSSIFIYHGEVPQASQVPPPSGFTVHGLPTSPDRPGSTSPFAPSATDLPSMPEPALTSRANMTEHKTSPTQCPAAGEVSNKLPKWPEPVEQFYRSLQDTYGAEPAGPDGILVEVDLVQARLERSSSKSLERELATPDWAERQLAQGGLAEVLLAAKEHRRPRETRVIAVLGKAGQGKSYWAGAVSRAWACGRLPQYDFVFSVPCHCLNRPGDAYGLQDLLFSLGPQPLVAADEVFSHILKRPDRVLLILDGFEELEAQDGFLHSTCGPAPAEPCSLRGLLAGLFQKKLLRGCTLLLTARPRGRLVQSLSKADALFELSGFSMEQAQAYVMRYFESSGMTEHQDRALTLLRDRPLLLSHSHSPTLCRAVCQLSEALLELGEDAKLPSTLTGLYVGLLGRAALDSPPGALAELAKLAWELGRRHQSTLQEDQFPSADVRTWAMAKGLVQHPPRAAESELAFPSFLLQCFLGALWLALSGEIKDKELPQYLALTPRKKRPYDNWLEGVPRFLAGLIFQPPARCLGALLGPSAAASVDRKQKVLARYLKRLQPGTLRARQLLELLHCAHEAEEAGIWQHVVQELPGRLSFLGTRLTPPDAHVLGKALEAAGQDFSLDLRSTGICPSGLGSLVGLSCVTRFRAALSDTVALWESLQQHGETKLLQAAEEKFTIEPFKAKSLKDVEDLGKLVQTQRTRSSSEDTAGELPAVRDLKKLEFALGPVSGPQAFPKLVRILTAFSSLQHLDLDALSENKIGDEGVSQLSATFPQLKSLETLNLSQNNITDLGAYKLAEALPSLAASLLRLSLYNNCICDVGAESLARVLPDMVSLRVMDVQYNKFTAAGAQQLAASLRRCPHVETLAMWTPTIPFSVQEHLQQQDSRISLR

SEQ ID NO: 458 - DNA, 4657 bp, Homo sapiens
  source 1..4657: mol_type = genomic DNA
ggttagtgatgaggctagtgatgaggctgtgtgcttctgagctgggcatccgaaggcatccttggggaagctgagggcacgaggaggggctgccagactccgggagctgctgcctggctgggattcctacacaatgcgttgcctggctccacgccctgctgggtcctacctgtcagagccccaaggcagctcacagtgtgccaccatggagttggggcccctagaaggtggctacctggagcttcttaacagcgatgctgaccccctgtgcctctaccacttctatgaccagatggacctggctggagaagaagagattgagctctactcagaacccgacacagacaccatcaactgcgaccagttcagcaggctgttgtgtgacatggaaggtgatgaagagaccagggaggcttatgccaatatcgcggaactggaccagtatgtcttccaggactcccagctggagggcctgagcaaggacattttcatagagcacataggaccagatgaagtgatcggtgagagtatggagatgccagcagaagttgggcagaaaagtcagaaaagacccttcccagaggagcttccggcagacctgaagcactggaagccagctgagccccccactgtggtgactggcagtctcctagtgggaccagtgagcgactgctccaccctgccctgcctgccactgcctgcgctgttcaaccaggagccagcctccggccagatgcgcctggagaaaaccgaccagattcccatgcctttctccagttcctcgttgagctgcctgaatctccctgagggacccatccagtttgtccccaccatctccactctgccccatgggctctggcaaatctctgaggctggaacaggggtctccagtatattcatctaccatggtgaggtgccccaggccagccaagtaccccctcccagtggattcactgtccacggcctcccaacatctccagaccggccaggctccaccagccccttcgctccatcagccactgacctgcccagcatgcctgaacctgccctgacctcccgagcaaacatgacagagcacaagacgtcccccacccaatgcccggcagctggagaggtctccaacaagcttccaaaatggcctgagccggtggagcagttctaccgctcactgcaggacacgtatggtgccgagcccgcaggcccggatggcatcctagtggaggtggatctggtgcaggccaggctggagaggagcagcagcaagagcctggagcgggaactggccaccccggactgggcagaacggcagctggcccaaggaggcctggctgaggtgctgttggctgccaaggagcaccggcggccgcgtgagacacgagtgattgctgtgctgggcaaagctggtcagggcaagagctattgggctggggcagtgagccgggcctgggcttgtggccggcttccccagtacgactttgtcttctctgtcccctgccattgcttgaaccgtccgggggatgcctatggcctgcaggatctgctcttctccctgggcccacagccactcgtggcggccgatgaggttttcagccacatcttgaagagacctgaccgcgttctgctcatcctagacggcttcgaggagctggaagcgcaagatggcttcctgcacagcacgtgcggaccggcaccggcggagccctgctccctccgggggctgctggccggccttttccagaagaagctgctccgaggttgcaccctcctcctcacagcccggccccggggccgcctggtccagagcctgagcaaggccgacgccctatttgagctgtccggcttctccatggagcaggcccaggcatacgtgatgcgctactttgagagctcagggatgacagagcaccaagacagagccctgacgctcctccgggaccggccacttcttctcagtcacagccacagccctactttgtgccgggcagtgtgccagctctcagaggccctgctggagcttggggaggacgccaagctgccctccacgctcacgggactctatgtcggcctgctgggccgtgcagccctcgacagcccccccggggccctggcagagctggccaagctggcctgggagctgggccgcagacatcaaagtaccctacaggaggaccagttcccatccgcagacgtgaggacctgggcgatggccaaaggcttagtccaacacccaccgcgggccgcagagtccgagctggccttccccagcttcctcctgcaatgcttcctgggggccctgtggctggctctgagtggcgaaatcaaggacaaggagctcccgcagtacctagcattgaccccaaggaagaagaggccctatgacaactggctggagggcgtgccacgctttctggctgggctgatcttccagcctcccgcccgctgcctgggagccctactcgggccatcggcggctgcctcggtggacaggaagcagaaggtgcttgcgaggtacctgaagcggctgcagccggggacactgcgggcgcggcagctgctggagctgctgcactgcgcccacgaggccgaggaggctggaatttggcagcacgtggtacaggagctccccggccgcctctcttttctgggcacccgcctcacgcctcctgatgcacatgtactgggcaaggccttggaggcggcgggccaagacttctccctggacctccgcagcactggcatttgcccctctggattggggagcctcgtgggactcagctgtgtcacccgtttcagggctgccttgagcgacacggtggcgctgtgggagtccctgcagcagcatggggagaccaagctacttcaggcagcagaggagaagttcaccatcgagcctttcaaagccaagtccctgaaggatgtggaagacctgggaaagcttgtgcagactcagaggacgagaagttcctcggaagacacagctggggagctccctgctgttcgggacctaaagaaactggagtttgcgctgggccctgtctcaggcccccaggctttccccaaactggtgcggatcctcacggccttttcctccctgcagcatctggacctggatgcgctgagtgagaacaagatcggggacgagggtgtctcgcagctctcagccaccttcccccagctgaagtccttggaaaccctcaatctgtcccagaacaacatcactgacctgggtgcctacaaactcgccgaggccctgccttcgctcgctgcatccctgctcaggctaagcttgtacaataactgcatctgcgacgtgggagccgagagcttggctcgtgtgcttccggacatggtgtccctccgggtgatggacgtccagtacaacaagttcacggctgccggggcccagcagctcgctgccagccttcggaggtgtcctcatgtggagacgctggcgatgtggacgcccaccatcccattcagtgtccaggaacacctgcaacaacaggattcacggatcagcctgagatgatcccagctgtgctctggacaggcatgttctctgaggacactaaccacgctggaccttgaactgggtacttgtggacacagctcttctccaggctgtatcccatgagcctcagcatcctggcacccggcccctgctggttcagggttggcccctgcccggctgcggaatgaaccacatcttgctctgctgacagacacaggcccggctccaggctcctttagcgcccagttgggtggatgcctggtggcagctgcggtccacccaggagccccgaggccttctctgaaggacattgcggacagccacggccaggccagagggagtgacagaggcagccccattctgcctgcccaggcccctgccaccctggggagaaagtacttctttttttttatttttagacagagtctcactgttgcccaggctggcgtgcagtggtgcgatctgggttcactgcaacctccgcctcttgggttcaagcgattcttctgcttcagcctcccgagtagctgggactacaggcacccaccatcatgtctggctaatttttcatttttagtagagacagggttttgccatgttggccaggctggtctcaaactcttgacctcaggtgatccacccacctcagcctcccaaagtgctgggattacaagcgtgagccactgcaccgggccacagagaaagtacttctccaccctgctctccgaccagacaccttgacagggcacaccgggcactcagaagacactgatgggcaacccccagcctgctaattccccagattgcaacaggctgggcttcagtggcagctgcttttgtctatgggactcaatgcactgacattgttggccaaagccaaagctaggcctggccagatgcaccagcccttagcagggaaacagctaatgggacactaatggggcggtgagaggggaacagactggaagcacagcttcatttcctgtgtcttttttcactacattataaatgtctctttaatgtcacaggcaggtccagggtttgagttcataccctgttaccattttggggtacccactgctctggttatctaatatgtaacaagccaccccaaatcatagtggcttaaaacaacactcacattta

SEQ ID NO: 459 - protein, 323 aa, Homo sapiens
MWPLVAALLLGSACCGSAQLLFNKTKSVEFTFCNDTVVIPCFVTNMEAQNTTEVYVKWKFKGRDIYTFDGALNKSTVPTDFSSAKIEVSQLLKGDASLKMDKSDAVSHTGNYTCEVTELTREGETIIELKYRVVSWFSPNENILIVIFPIFAILLFWGQFGIKTLKYRSGGMDEKTIALLVAGLVITVIVIVGAILFVPGEYSLKNATGLGLIVTSTGILILLHYYVFSTAIGLTSFVIAILVIQVIAYILAVVGLSLCIAACIPMHGPLLISGLSILALAQLLGLVYMKFVASNQKTIQPPRKAVEEPLNAFKESKGMMNDE

SEQ ID NO: 460 - DNA, 5292 bp, Homo sapiens
  source 1..5292: mol_type = genomic DNA
gcagcctgggcagtgggtcctgcctgtgacgcgcggcggcggtcggtcctgcctgtaacggcggcggcggctgctgctccggacacctgcggcggcggcggcgaccccgcggcgggcgcggagatgtggcccctggtagcggcgctgttgctgggctcggcgtgctgcggatcagctcagctactatttaataaaacaaaatctgtagaattcacgttttgtaatgacactgtcgtcattccatgctttgttactaatatggaggcacaaaacactactgaagtatacgtaaagtggaaatttaaaggaagagatatttacacctttgatggagctctaaacaagtccactgtccccactgactttagtagtgcaaaaattgaagtctcacaattactaaaaggagatgcctctttgaagatggataagagtgatgctgtctcacacacaggaaactacacttgtgaagtaacagaattaaccagagaaggtgaaacgatcatcgagctaaaatatcgtgttgtttcatggttttctccaaatgaaaatattcttattgttattttcccaatttttgctatactcctgttctggggacagtttggtattaaaacacttaaatatagatccggtggtatggatgagaaaacaattgctttacttgttgctggactagtgatcactgtcattgtcattgttggagccattcttttcgtcccaggtgaatattcattaaagaatgctactggccttggtttaattgtgacttctacagggatattaatattacttcactactatgtgtttagtacagcgattggattaacctccttcgtcattgccatattggttattcaggtgatagcctatatcctcgctgtggttggactgagtctctgtattgcggcgtgtataccaatgcatggccctcttctgatttcaggtttgagtatcttagctctagcacaattacttggactagtttatatgaaatttgtggcttccaatcagaagactatacaacctcctaggaaagctgtagaggaaccccttaatgcattcaaagaatcaaaaggaatgatgaatgatgaataactgaagtgaagtgatggactccgatttggagagtagtaagacgtgaaaggaatacacttgtgtttaagcaccatggccttgatgattcactgttggggagaagaaacaagaaaagtaactggttgtcacctatgagacccttacgtgattgttagttaagtttttattcaaagcagctgtaatttagttaataaaataattatgatctatgttgtttgcccaattgagatccagttttttgttgttatttttaatcaattaggggcaatagtagaatggacaatttccaagaatgatgcctttcaggtcctagggcctctggcctctaggtaaccagtttaaattggttcagggtgataactacttagcactgccctggtgattacccagagatatctatgaaaaccagtggcttccatcaaacctttgccaactcaggttcacagcagctttgggcagttatggcagtatggcattagctgagaggtgtctgccacttctgggtcaatggaataataaattaagtacaggcaggaatttggttgggagcatcttgtatgatctccgtatgatgtgatattgatggagatagtggtcctcattcttgggggttgccattcccacattcccccttcaacaaacagtgtaacaggtccttcccagatttagggtacttttattgatggatatgttttccttttattcacataaccccttgaaaccctgtcttgtcctcctgttacttgcttctgctgtacaagatgtagcaccttttctcctctttgaacatggtctagtgacacggtagcaccagttgcaggaaggagccagacttgttctcagagcactgtgttcacacttttcagcaaaaatagctatggttgtaacatatgtattcccttcctctgatttgaaggcaaaaatctacagtgtttcttcacttcttttctgatctggggcatgaaaaaagcaagattgaaatttgaactatgagtctcctgcatggcaacaaaatgtgtgtcaccatcaggccaacaggccagcccttgaatggggatttattactgttgtatctatgttgcatgataaacattcatcaccttcctcctgtagtcctgcctcgtactccccttcccctatgattgaaaagtaaacaaaacccacatttcctatcctggttagaagaaaattaatgttctgacagttgtgatcgcctggagtacttttagacttttagcattcgttttttacctgtttgtggatgtgtgtttgtatgtgcatacgtatgagataggcacatgcatcttctgtatggacaaaggtggggtacctacaggagagcaaaggttaattttgtgcttttagtaaaaacatttaaatacaaagttctttattgggtggaattatatttgatgcaaatatttgatcacttaaaacttttaaaacttctaggtaatttgccacgctttttgactgctcaccaataccctgtaaaaatacgtaattcttcctgtttgtgtaataagatattcatatttgtagttgcattaataatagttatttcttagtccatcagatgttcccgtgtgcctcttttatgccaaattgattgtcatatttcatgttgggaccaagtagtttgcccatggcaaacctaaatttatgacctgctgaggcctctcagaaaactgagcatactagcaagacagctcttcttgaaaaaaaaaatatgtatacacaaatatatacgtatatctatatatacgtatgtatatacacacatgtatattcttccttgattgtgtagctgtccaaaataataacatatatagagggagctgtattcctttatacaaatctgatggctcctgcagcactttttccttctgaaaatatttacattttgctaacctagtttgttactttaaaaatcagttttgatgaaaggagggaaaagcagatggacttgaaaaagatccaagctcctattagaaaaggtatgaaaatctttatagtaaaattttttataaactaaagttgtaccttttaatatgtagtaaactctcatttatttggggttcgctcttggatctcatccatccattgtgttctctttaatgctgcctgccttttgaggcattcactgccctagacaatgccaccagagatagtgggggaaatgccagatgaaaccaactcttgctctcactagttgtcagcttctctggataagtgaccacagaagcaggagtcctcctgcttgggcatcattgggccagttccttctctttaaatcagatttgtaatggctcccaaattccatcacatcacatttaaattgcagacagtgttttgcacatcatgtatctgttttgtcccataatatgctttttactccctgatcccagtttctgctgttgactcttccattcagttttatttattgtgtgttctcacagtgacaccatttgtccttttctgcaacaacctttccagctacttttgccaaattctatttgtcttctccttcaaaacattctcctttgcagttcctcttcatctgtgtagctgctcttttgtctcttaacttaccattcctatagtactttatgcatctctgcttagttctattagttttttggccttgctcttctccttgattttaaaattccttctatagctagagcttttctttctttcattctctcttcctgcagtgttttgcatacatcagaagctaggtacataagttaaatgattgagagttggctgtatttagatttatcactttttaatagggtgagcttgagagttttctttctttctgttttttttttttgttttttttttttttttttttttttttttttttgactaatttcacatgctctaaaaaccttcaaaggtgattatttttctcctggaaactccaggtccattctgtttaaatccctaagaatgtcagaattaaaataacagggctatcccgtaattggaaatatttcttttttcaggatgctatagtcaatttagtaagtgaccaccaaattgttatttgcactaacaaagctcaaaacacgataagtttactcctccatctcagtaataaaaattaagctgtaatcaaccttctaggtttctcttgtcttaaaatgggtattcaaaaatggggatctgtggtgtatgtatggaaacacatactccttaatttacctgttgttggaaactggagaaatgattgtcgggcaaccgtttattttttattgtattttatttggttgagggatttttttataaacagttttacttgtgtcatattttaaaattactaactgccatcacctgctggggtcctttgttaggtcattttcagtgactaatagggataatccaggtaactttgaagagatgagcagtgagtgaccaggcagtttttctgcctttagctttgacagttcttaattaagatcattgaagaccagctttctcataaatttctctttttgaaaaaaagaaagcatttgtactaagctcctctgtaagacaacatcttaaatcttaaaagtgttgttatcatgactggtgagagaagaaaacattttgtttttattaaatggagcattatttacaaaaagccattgttgagaattagatcccacatcgtataaatatctattaaccattctaaataaagagaactccagtgttgctatgtgcaagatcctctcttggagcttttttgcatagcaattaaaggtgtgctatttgtcagtagccatttttttgcagtgatttgaagaccaaagttgttttacagctgtgttaccgttaaaggtttttttttttatatgtattaaatcaatttatcactgtttaaagctttgaatatctgcaatctttgccaaggtacttttttatttaaaaaaaaacataactttgtaaatattaccctgtaatattatatatacttaataaaacattttaagctattttgttgggctatttctattgctgctacagcagaccacaagcacatttctgaaaaatttaatttattaatgtatttttaagttgcttatattctaggtaacaatgtaaagaatgatttaaaatattaattatgaattttttgagtataatacccaataagcttttaattagagcagagttttaattaaaagttttaaatcagtccaa

SEQ ID NO: 461 - protein, 250 aa, Homo sapiens
MVAGSDAGRALGVLSVVCLLHCFGFISCFSQQIYGVVYGNVTFHVPSNVPLKEVLWKKQKDKVAELENSEFRAFSSFKNRVYLDTVSGSLTIYNLTSSDEDEYEMESPNITDTMKFFLYVLESLPSPTLTCALTNGSIEVQCMIPEHYNSHRGLIMYSWDCPMEQCKRNSTSIYFKMENDLPQKIQCTLSNPLFNTTSSIILTTCIPSSGHSRHRYALIPIPLAVITTCIVLYMNGILKCDRKPDRTNSN

SEQ ID NO: 462 - DNA, 753 bp, Homo sapiens
  source 1..753: mol_type = genomic DNA
atggttgctgggagcgacgcggggcgggccctgggggtcctcagcgtggtctgcctgctgcactgctttggtttcatcagctgtttttcccaacaaatatatggtgttgtgtatgggaatgtaactttccatgtaccaagcaatgtgcctttaaaagaggtcctatggaaaaaacaaaaggataaagttgcagaactggaaaattctgaattcagagctttctcatcttttaaaaatagggtttatttagacactgtgtcaggtagcctcactatctacaacttaacatcatcagatgaagatgagtatgaaatggaatcgccaaatattactgataccatgaagttctttctttatgtgcttgagtctcttccatctcccacactaacttgtgcattgactaatggaagcattgaagtccaatgcatgataccagagcattacaacagccatcgaggacttataatgtactcatgggattgtcctatggagcaatgtaaacgtaactcaaccagtatatattttaagatggaaaatgatcttccacaaaaaatacagtgtactcttagcaatccattatttaatacaacatcatcaatcattttgacaacctgtatcccaagcagcggtcattcaagacacagatatgcacttatacccataccattagcagtaattacaacatgtattgtgctgtatatgaatggtattctgaaatgtgacagaaaaccagacagaaccaactccaattga

SEQ ID NO: 463 - protein, 358 aa, Homo sapiens
MVDGTLLLLLSEALALTQTWAGSHSLKYFHTSVSRPGRGEPRFISVGYVDDTQFVRFDNDAASPRMVPRAPWMEQEGSEYWDRETRSARDTAQIFRVNLRTLRGYYNQSEAGSHTLQWMHGCELGPDGRFLRGYEQFAYDGKDYLTLNEDLRSWTAVDTAAQISEQKSNDASEAEHQRAYLEDTCVEWLHKYLEKGKETLLHLEPPKTHVTHHPISDHEATLRCWALGFYPAEITLTWQQDGEGHTQDTELVETRPAGDGTFQKWAAVVVPSGEEQRYTCHVQHEGLPEPVTLRWKPASQPTIPIVGIIAGLVLLGSVVSGAVVAAVIWRKKSSGGKGGSYSKAEWSDSAQGSESHSL

SEQ ID NO: 464 - DNA, 2548 bp, Homo sapiens
  source 1..2548: mol_type = genomic DNA
ctcaggactcagaggctgggatcatggtagatggaaccctccttttactcctctcggaggccctggcccttacccagacctgggcgggctcccactccttgaagtatttccacacttccgtgtcccggcccggccgcggggagccccgcttcatctctgtgggctacgtggacgacacccagttcgtgcgcttcgacaacgacgccgcgagtccgaggatggtgccgcgggcgccgtggatggagcaggaggggtcagagtattgggaccgggagacacggagcgccagggacaccgcacagattttccgagtgaatctgcggacgctgcgcggctactacaatcagagcgaggccgggtctcacaccctgcagtggatgcatggctgcgagctggggcccgacgggcgcttcctccgcgggtatgaacagttcgcctacgacggcaaggattatctcaccctgaatgaggacctgcgctcctggaccgcggtggacacggcggctcagatctccgagcaaaagtcaaatgatgcctctgaggcggagcaccagagagcctacctggaagacacatgcgtggagtggctccacaaatacctggagaaggggaaggagacgctgcttcacctggagcccccaaagacacacgtgactcaccaccccatctctgaccatgaggccaccctgaggtgctgggccctgggcttctaccctgcggagatcacactgacctggcagcaggatggggagggccatacccaggacacggagctcgtggagaccaggcctgcaggggatggaaccttccagaagtgggcagctgtggtggtgccttctggagaggagcagagatacacgtgccatgtgcagcatgaggggctacccgagcccgtcaccctgagatggaagccggcttcccagcccaccatccccatcgtgggcatcattgctggcctggttctccttggatctgtggtctctggagctgtggttgctgctgtgatatggaggaagaagagctcaggtggaaaaggagggagctactctaaggctgagtggagcgacagtgcccaggggtctgagtctcacagcttgtaaagcctgagacagctgccttgtgtgcgactgagatgcacagctgccttgtgtgcgactgagatgcaggatttcctcacgcctcccctatgtgtcttaggggactctggcttctctttttgcaagggcctctgaatctgtctgtgtccctgttagcacaatgtgaggaggtagagaaacagtccacctctgtgtctaccatgacccccttcctcacactgacctgtgttccttccctgttctcttttctattaaaaataagaacctgggcagagtgcggcagctcatgcctgtaatcccagcacttagggaggccgaggagggcagatcacgaggtcaggagatcgaaaccatcctggctaacacggtgaaaccccgtctctactaaaaaatacaaaaaattagctgggcgcagaggcacgggcctgtagtcccagctactcaggaggcggaggcaggagaatggcgtcaacccgggaggcggaggttgcagtgagccaggattgtgcgactgcactccagcctgggtgacagggtgaaacgccatctcaaaaaataaaaattgaaaaataaaaaaagaacctggatctcaatttaatttttcatattcttgcaatgaaatggacttgaggaagctaagatcatagctagaaatacagataattccacagcacatctctagcaaatttagcctattcctattctctagcctattccttaccacctgtaatcttgaccatataccttggagttgaatattgttttcatactgctgtggtttgaatgttccctccaacactcatgttgagacttaatccctaatgtggcaatactgaaaggtggggcctttgagatgtgattggatcgtaaggctgtgccttcattcatgggttaatggattaatgggttatcacaggaatgggactggtggctttataagaagaggaaaagagaactgagctagcatgcccagcccacagagagcctccactagagtgatgctaagtggaaatgtgaggtgcagctgccacagagggcccccaccagggaaatgtctagtgtctagtggatccaggccacaggagagagtgccttgtggagcgctgggagcaggacctgaccaccaccaggaccccagaactgtggagtcagtggcagcatgcagcgcccccttgggaaagctttaggcaccagcctgcaacccattcgagcagccacgtaggctgcacccagcaaagccacaggcacggggctacctgaggccttgggggcccaatccctgctccagtgtgtccgtgaggcagcacacgaagtcaaaagagattattctcttcccacagataccttttctctcccatgaccctttaacagcatctgcttcattcccctcaccttcccaggctgatctgaggtaaactttgaagtaaaataaaagctgtgtttgagcatca

SEQ ID NO: 465 - protein, 343 aa, Homo sapiens
MKTPRMVVMAPRTLFLLLSGALTLTETWAGSHSMRYFSAAVSRPGRGEPRFIAMGYVDDTQFVRFDSDSACPRMEPRAPWVEQEGPEYWEEETRNTKAHAQTDRMNLQTLRGYYNQSEASSHTLQWMIGCDLGSDGRLLRGYEQYAYDGKDYLALNEDLRSWTAADTAAQISKRKCEAANVAEQRRAYLEGTCVEWLHRYLENGKEMLQRADPPKTHVTHHPVFDYEATLRCWALGFYPAEIILTWQRDGEDQTQDVELVETRPAGDGTFQKWAAVVVPSGEEQRYTCHVQHEGLPEPLMLRWKQSSLPTIPIMGIVAGLVVLAAVVTGAAVAAVLWRKKSSD

SEQ ID NO: 466 - DNA, 1386 bp, Homo sapiens
  source 1..1386: mol_type = genomic DNA
atatagtaacatagtgtggtactttgtcttgaggagatgtcctggactcacacggaaacttagggctacggaatgaagacgccaaggatggtggtcatggcgccccgaaccctcttcctgctgctctcgggggccctgaccctgaccgagacctgggcgggctcccactccatgaggtatttcagcgccgccgtgtcccggcccggccgcggggagccccgcttcatcgccatgggctacgtggacgacacgcagttcgtgcggttcgacagcgactcggcgtgtccgaggatggagccgcgggcgccgtgggtggagcaggaggggccggagtattgggaagaggagacacggaacaccaaggcccacgcacagactgacagaatgaacctgcagaccctgcgcggctactacaaccagagcgaggccagttctcacaccctccagtggatgattggctgcgacctggggtccgacggacgcctcctccgcgggtatgaacagtatgcctacgatggcaaggattacctcgccctgaacgaggacctgcgctcctggaccgcagcggacactgcggctcagatctccaagcgcaagtgtgaggcggccaatgtggctgaacaaaggagagcctacctggagggcacgtgcgtggagtggctccacagatacctggagaacgggaaggagatgctgcagcgcgcggacccccccaagacacacgtgacccaccaccctgtctttgactatgaggccaccctgaggtgctgggccctgggcttctaccctgcggagatcatactgacctggcagcgggatggggaggaccagacccaggacgtggagctcgtggagaccaggcctgcaggggatggaaccttccagaagtgggcagctgtggtggtgccttctggagaggagcagagatacacgtgccatgtgcagcatgaggggctgccggagcccctcatgctgagatggaagcagtcttccctgcccaccatccccatcatgggtatcgttgctggcctggttgtccttgcagctgtagtcactggagctgcggtcgctgctgtgctgtggagaaagaagagctcagattgaaaaggagggagctactctcaggctgcaatgtgaaacagctgccctgtgtgggactgagtggcaagtccctttgtgacttcaagaaccctgactcctctttgtgcagagaccagcccacccctgtgcccaccatgaccctcttcctcatgctgaactgcattccttccccaatcacctttcctgttccagaaaaggggctgggatgtctccgtctctgtctcaaatttgtggtccactgagctataacttacttctgtattaaaattagaatctgagtataaa

SEQ ID NO: 467 - protein, 290 aa, Homo sapiens
MRIFAVFIFMTYWHLLNAFTVTVPKDLYVVEYGSNMTIECKFPVEKQLDLAALIVYWEMEDKNIIQFVHGEEDLKVQHSSYRQRARLLKDQLSLGNAALQITDVKLQDAGVYRCMISYGGADYKRITVKVNAPYNKINQRILVVDPVTSEHELTCQAEGYPKAEVIWTSSDHQVLSGKTTTTNSKREEKLFNVTSTLRINTTTNEIFYCTFRRLDPEENHTAELVIPELPLAHPPNERTHLVILGAILLCLGVALTFIFRLRKGRMMDVKKCGIQDTNSKKQSDTHLEET

SEQ ID NO: 468 - DNA, 3634 bp, Homo sapiens
  source 1..3634: mol_type = genomic DNA
agttctgcgcagcttcccgaggctccgcaccagccgcgcttctgtccgcctgcagggcattccagaaagatgaggatatttgctgtctttatattcatgacctactggcatttgctgaacgcatttactgtcacggttcccaaggacctatatgtggtagagtatggtagcaatatgacaattgaatgcaaattcccagtagaaaaacaattagacctggctgcactaattgtctattgggaaatggaggataagaacattattcaatttgtgcatggagaggaagacctgaaggttcagcatagtagctacagacagagggcccggctgttgaaggaccagctctccctgggaaatgctgcacttcagatcacagatgtgaaattgcaggatgcaggggtgtaccgctgcatgatcagctatggtggtgccgactacaagcgaattactgtgaaagtcaatgccccatacaacaaaatcaaccaaagaattttggttgtggatccagtcacctctgaacatgaactgacatgtcaggctgagggctaccccaaggccgaagtcatctggacaagcagtgaccatcaagtcctgagtggtaagaccaccaccaccaattccaagagagaggagaagcttttcaatgtgaccagcacactgagaatcaacacaacaactaatgagattttctactgcacttttaggagattagatcctgaggaaaaccatacagctgaattggtcatcccagaactacctctggcacatcctccaaatgaaaggactcacttggtaattctgggagccatcttattatgccttggtgtagcactgacattcatcttccgtttaagaaaagggagaatgatggatgtgaaaaaatgtggcatccaagatacaaactcaaagaagcaaagtgatacacatttggaggagacgtaatccagcattggaacttctgatcttcaagcagggattctcaacctgtggtttaggggttcatcggggctgagcgtgacaagaggaaggaatgggcccgtgggatgcaggcaatgtgggacttaaaaggcccaagcactgaaaatggaacctggcgaaagcagaggaggagaatgaagaaagatggagtcaaacagggagcctggagggagaccttgatactttcaaatgcctgaggggctcatcgacgcctgtgacagggagaaaggatacttctgaacaaggagcctccaagcaaatcatccattgctcatcctaggaagacgggttgagaatccctaatttgagggtcagttcctgcagaagtgccctttgcctccactcaatgcctcaatttgttttctgcatgactgagagtctcagtgttggaacgggacagtatttatgtatgagtttttcctatttattttgagtctgtgaggtcttcttgtcatgtgagtgtggttgtgaatgatttcttttgaagatatattgtagtagatgttacaattttgtcgccaaactaaacttgctgcttaatgatttgctcacatctagtaaaacatggagtatttgtaaggtgcttggtctcctctataactacaagtatacattggaagcataaagatcaaaccgttggttgcataggatgtcacctttatttaacccattaatactctggttgacctaatcttattctcagacctcaagtgtctgtgcagtatctgttccatttaaatatcagctttacaattatgtggtagcctacacacataatctcatttcatcgctgtaaccaccctgttgtgataaccactattattttacccatcgtacagctgaggaagcaaacagattaagtaacttgcccaaaccagtaaatagcagacctcagactgccacccactgtccttttataatacaatttacagctatattttactttaagcaattcttttattcaaaaaccatttattaagtgcccttgcaatatcaatcgctgtgccaggcattgaatctacagatgtgagcaagacaaagtacctgtcctcaaggagctcatagtataatgaggagattaacaagaaaatgtattattacaatttagtccagtgtcatagcataaggatgatgcgaggggaaaacccgagcagtgttgccaagaggaggaaataggccaatgtggtctgggacggttggatatacttaaacatcttaataatcagagtaattttcatttacaaagagaggtcggtacttaaaataaccctgaaaaataacactggaattccttttctagcattatatttattcctgatttgcctttgccatataatctaatgcttgtttatatagtgtctggtattgtttaacagttctgtcttttctatttaaatgccactaaattttaaattcatacctttccatgattcaaaattcaaaagatcccatgggagatggttggaaaatctccacttcatcctccaagccattcaagtttcctttccagaagcaactgctactgcctttcattcatatgttcttctaaagatagtctacatttggaaatgtatgttaaaagcacgtatttttaaaatttttttcctaaatagtaacacattgtatgtctgctgtgtactttgctatttttatttattttagtgtttcttatatagcagatggaatgaatttgaagttcccagggctgaggatccatgccttctttgtttctaagttatctttcccatagcttttcattatctttcatatgatccagtatatgttaaatatgtcctacatatacatttagacaaccaccatttgttaagtatttgctctaggacagagtttggatttgtttatgtttgctcaaaaggagacccatgggctctccagggtgcactgagtcaatctagtcctaaaaagcaatcttattattaactctgtatgacagaatcatgtctggaacttttgttttctgctttctgtcaagtataaacttcactttgatgctgtacttgcaaaatcacattttctttctggaaattccggcagtgtaccttgactgctagctaccctgtgccagaaaagcctcattcgttgtgcttgaacccttgaatgccaccagctgtcatcactacacagccctcctaagaggcttcctggaggtttcgagattcagatgccctgggagatcccagagtttcctttccctcttggccatattctggtgtcaatgacaaggagtaccttggctttgccacatgtcaaggctgaagaaacagtgtctccaacagagctccttgtgttatctgtttgtacatgtgcatttgtacagtaattggtgtgacagtgttctttgtgtgaattacaggcaagaattgtggctgagcaaggcacatagtctactcagtctattcctaagtcctaactcctccttgtggtgttggatttgtaaggcactttatcccttttgtctcatgtttcatcgtaaatggcataggcagagatgatacctaattctgcatttgattgtcactttttgtacctgcattaatttaataaaatattcttatttattttgttacttggtacaccagcatgtccattttcttgtttattttgtgtttaataaaatgttcagtttaacatccca

SEQ ID NO: 469 - protein, 448 aa, Homo sapiens
MKSLSLLLAVALGLATAVSAGPAVIECWFVEDASGKGLAKRPGALLLRQGPGEPPPRPDLDPELYLSVHDPAGALQAAFRRYPRGAPAPHCEMSRFVPLPASAKWASGLTPAQNCPRALDGAWLMVSISSPVLSLSSLLRPQPEPQQEPVLITMATVVLTVLTHTPAPRVRLGQDALLDLSFAYMPPTSEAASSLAPGPPPFGLEWRRQHLGKGHLLLAATPGLNGQMPAAQEGAVAFAAWDDDEPWGPWTGNGTFWLPTVQPFQEGTYLATIHLPYLQGQVTLELAVYKPPKVSLMPATLARAAPGEAPPELLCLVSHFYPSGGLEVEWELRGGPGGRSQKAEGQRWLSALRHHSDGSVSLSGHLQPPPVTTEQHGARYACRIHHPSLPASGRSAEVTLEVAGLSGPSLEDSVGLFLSAFLLLGLFKALGWAAVYLSTCKDSKKKAE

SEQ ID NO: 470 - DNA, 3450 bp, Homo sapiens
  source 1..3450: mol_type = genomic DNA
gaagaggaggcttcatggctgaggaggtcgcagcgccatgaagtccctgtctctgctcctcgctgtggctttgggcctggcgaccgccgtctcagcaggacccgcggtgatcgagtgttggttcgtggaggatgcgagcggaaagggcctggccaagagacccggtgcactgctgttgcgccagggaccgggggaaccgccgccccggccggacctcgaccctgagctctatctcagtgtacacgaccccgcgggcgccctccaggctgccttcaggcggtatccccggggcgcccccgcaccacactgcgagatgagccgcttcgtgcctctccccgcctctgcgaaatgggccagcggcctgacccccgcgcagaactgcccgcgggccctggatggggcttggctgatggtcagcatatccagcccagtcctcagcctctccagcctcttgcgaccacagccagagcctcagcaggagcctgttctcatcaccatggcaacagtggtactgactgtcctcacccacacccctgcccctcgagtgagactgggacaagatgctctgctggacttgagctttgcctacatgccccccacctccgaggccgcctcatctctggctccgggtccccctccctttgggctagagtggcgacgccagcacctgggtaagggacatctgctcctggctgcaactcctgggctgaatggccagatgccagcagcccaagaaggggccgtggcatttgctgcttgggatgatgatgagccatggggcccatggaccggaaatgggaccttctggctgcctacagttcaaccctttcaggagggcacctatctggccaccatacacctgccatacctgcaaggacaggtcaccctggagcttgctgtgtacaaaccccccaaagtgtccctgatgccagcaacccttgcacgggccgccccaggggaggcacccccggaattgctctgccttgtgtcccacttctacccttctgggggcctggaggtggagtgggaactccggggtggcccagggggccgctctcagaaggccgaggggcagaggtggctctcggccctgcgccaccattccgatggctctgtcagcctctctgggcacttgcagccgcccccagtcaccactgagcagcatggggcacgctatgcctgtcgaattcaccatcccagcctgcctgcctcggggcgcagcgctgaggtcaccctggaggtagcaggtctttcagggccctcccttgaggacagcgtaggccttttcctgtctgcctttcttctgcttgggctcttcaaggcactgggctgggctgctgtctacctgtccacctgcaaggattcaaagaagaaagcagagtgagggcactcactgccatcctgtggaagccaccatcatctctggcccaagcttctgtagtagctccctaaaataataccctatcatctgctcctaatccctccaatctctctccactgagtggctggaatgcttttttttttttctttcacttatataagggataatttttcttttttttttttttttgagacggagtctcactcttccgcccaggctgcagtgcagtggcatgatcttggcttactgcaacctccgcctcctgggttcaagcaattctgtggcttcagcctccggagtagctgggattacaggcacatgccaccacacccagtgaatttttgtatttttagtagagacggggtttcaccatgttggccaggctggtcttgaattcctgacctcaggtgatctgcccacctcagcctcccaaagtgctgggattacaggcgtgagccaccacaccaggcccgagaaatgcttttttaaaaaacacacatcttatggcattcaccttcttggagctctaggacagtggttctcaaaatttttttctctcaggacctcttaaaaatcatcaaggaccccaaaaagcttttgggtatgtgggttatagctatcaatatttatggtactagaacttaaaagtgagaaaaatttaaaacacgagaatacataggcacacattctattcatcgtgggaaccatggtgtcaatacatatcatgtagcttctgaaaaactccactgtacacttatagaatgaagaaggcaaaaaacttttttttttttttttttgagacggagtctcgctctgtcgcccaggctggagtgcagtggcgcgatctcggctcactgcaagctccgcctctcgggttcacgccattctcctgcctcagcctcccaagtagctcggactacaggcgtcctccaccatgcctggctaatattttgtattttttagtagagacggggtttcaccgtgttagccaggatggtctcgatctcctaacctggtgatccgcccgcctcggcctcccaaagtattgggattacccgcgtgagccaccgcgcccggctgcaaataatctttctttttttctgagacagagtctcgctctgttgcccaggctggagtgcagtggcacgatctcggctcacggcacgctccgcctcccgggttcacgccattctcctgcctcagcttcccgagtagctgggactacaggggcccgccaccacgcccggctaactttttgtgtttttagtagagacggggtttcaccgtgttagccaggatggtctcgatctcctgaccttgtgatctgcccgcctcggcctcccaaagtgctgggattacaggcgtgagccaccgcgcccggcggcgaaacacgatattgtactaacatcttaattttgttataaaatctcacaaaccccctgacatagtctcagagatctgtagggccgaggttacatttggagaacccgtactctagggccaaatccattcttcttgccctggctcacttgtcccccccaccgccccgcgctggagccactgcctagttcttcagccctagatggtgctcgccagacctcctctcaatgctcatcacacacagggctattcctttcctccaatgaaccaaacgcctcccgcccacctccaggtcccagtcctctgttccctttgcctggtccacccttgccctccctgggtcgcagacgaggtcggcctcgtcattccccgcagaccgccgcgcgtccctcttgtgcggttcaccacagttgtatttaagtgatcgtgtgagtcgtcgttaaatgcctgtctccccgcggatcatgggctcctcgaggacagggactggcctgtctgtccactgctgtaaccccgcgccggcatagggacctaaggcccactggagggcgctcatcaagtagctgctggatgttgacgaaggaagcggcggcgcagctcagggatctccgagtcaggacggtcggccagacccacggggtaacgggtctaatcgtgtaggaataaagctgtattccagtgcttccaaa

SEQ ID NO: 471 - protein, 140 aa, Homo sapiens
IQNPDPAVYQLRDSKSSDKSVCLFTDFDSQTNVSQSKDSDVYITDKTVLDMRSMDFKSNSAVAWSNKSDFACANAFNNSIIPEDTFFPSPESSCDVKLVEKSFETDTNLNFQNLSVIGFRILLLKVAGFNLLMTLRLWSS

SEQ ID NO: 472 - DNA, 5651 bp, Homo sapiens
  source 1..5651: mol_type = genomic DNA
catgctaatcctccggcaaacctctgtttcctcctcaaaaggcaggaggtcggaaagaataaacaatgagagtcacattaaaaacacaaaatcctacggaaatactgaagaatgagtctcagcactaaggaaaagcctccagcagctcctgctttctgagggtgaaggatagacgctgtggctctgcatgactcactagcactctatcacggccatattctggcagggtcagtggctccaactaacatttgtttggtactttacagtttattaaatagatgtttatatggagaagctctcatttctttctcagaagagcctggctaggaaggtggatgaggcaccatattcattttgcaggtgaaattcctgagatgtaaggagctgctgtgacttgctcaaggccttatatcgagtaaacggtagtgctggggcttagacgcaggtgttctgatttatagttcaaaacctctatcaatgagagagcaatctcctggtaatgtgatagatttcccaacttaatgccaacataccataaacctcccattctgctaatgcccagcctaagttggggagaccactccagattccaagatgtacagtttgctttgctgggcctttttcccatgcctgcctttactctgccagagttatattgctggggttttgaagaagatcctattaaataaaagaataagcagtattattaagtagccctgcatttcaggtttccttgagtggcaggccaggcctggccgtgaacgttcactgaaatcatggcctcttggccaagattgatagcttgtgcctgtccctgagtcccagtccatcacgagcagctggtttctaagatgctatttcccgtataaagcatgagaccgtgacttgccagccccacagagccccgcccttgtccatcactggcatctggactccagcctgggttggggcaaagagggaaatgagatcatgtcctaaccctgatcctcttgtcccacagatatccagaaccctgaccctgccgtgtaccagctgagagactctaaatccagtgacaagtctgtctgcctattcaccgattttgattctcaaacaaatgtgtcacaaagtaaggattctgatgtgtatatcacagacaaaactgtgctagacatgaggtctatggacttcaagagcaacagtgctgtggcctggagcaacaaatctgactttgcatgtgcaaacgccttcaacaacagcattattccagaagacaccttcttccccagcccaggtaagggcagctttggtgccttcgcaggctgtttccttgcttcaggaatggccaggttctgcccagagctctggtcaatgatgtctaaaactcctctgattggtggtctcggccttatccattgccaccaaaaccctctttttactaagaaacagtgagccttgttctggcagtccagagaatgacacgggaaaaaagcagatgaagagaaggtggcaggagagggcacgtggcccagcctcagtctctccaactgagttcctgcctgcctgcctttgctcagactgtttgccccttactgctcttctaggcctcattctaagccccttctccaagttgcctctccttatttctccctgtctgccaaaaaatctttcccagctcactaagtcagtctcacgcagtcactcattaacccaccaatcactgattgtgccggcacatgaatgcaccaggtgttgaagtggaggaattaaaaagtcagatgaggggtgtgcccagaggaagcaccattctagttgggggagcccatctgtcagctgggaaaagtccaaataacttcagattggaatgtgttttaactcagggttgagaaaacagctaccttcaggacaaaagtcagggaagggctctctgaagaaatgctacttgaagataccagccctaccaagggcagggagaggaccctatagaggcctgggacaggagctcaatgagaaaggagaagagcagcaggcatgagttgaatgaaggaggcagggccgggtcacagggccttctaggccatgagagggtagacagtattctaaggacgccagaaagctgttgatcggcttcaagcaggggagggacacctaatttgcttttcttttttttttttttttttttttttttttttgagatggagttttgctcttgttgcccaggctggagtgcaatggtgcatcttggctcactgcaacctccgcctcccaggttcaagtgattctcctgcctcagcctcccgagtagctgagattacaggcacccgccaccatgcctggctaattttttgtatttttagtagagacagggtttcactatgttggccaggctggtctcgaactcctgacctcaggtgatccacccgcttcagcctcccaaagtgctgggattacaggcgtgagccaccacacccggcctgcttttcttaaagatcaatctgagtgctgtacggagagtgggttgtaagccaagagtagaagcagaaagggagcagttgcagcagagagatgatggaggcctgggcagggtggtggcagggaggtaaccaacaccattcaggtttcaaaggtagaaccatgcagggatgagaaagcaaagaggggatcaaggaaggcagctggattttggcctgagcagctgagtcaatgatagtgccgtttactaagaagaaaccaaggaaaaaatttggggtgcagggatcaaaactttttggaacatatgaaagtacgtgtttatactctttatggcccttgtcactatgtatgcctcgctgcctccattggactctagaatgaagccaggcaagagcagggtctatgtgtgatggcacatgtggccagggtcatgcaacatgtactttgtacaaacagtgtatattgagtaaatagaaatggtgtccaggagccgaggtatcggtcctgccagggccaggggctctccctagcaggtgctcatatgctgtaagttccctccagatctctccacaaggaggcatggaaaggctgtagttgttcacctgcccaagaactaggaggtctggggtgggagagtcagcctgctctggatgctgaaagaatgtctgtttttccttttagaaagttcctgtgatgtcaagctggtcgagaaaagctttgaaacaggtaagacaggggtctagcctgggtttgcacaggattgcggaagtgatgaacccgcaataaccctgcctggatgagggagtgggaagaaattagtagatgtgggaatgaatgatgaggaatggaaacagcggttcaagacctgcccagagctgggtggggtctctcctgaatccctctcaccatctctgactttccattctaagcactttgaggatgagtttctagcttcaatagaccaaggactctctcctaggcctctgtattcctttcaacagctccactgtcaagagagccagagagagcttctgggtggcccagctgtgaaatttctgagtcccttagggatagccctaaacgaaccagatcatcctgaggacagccaagaggttttgccttctttcaagacaagcaacagtactcacataggctgtgggcaatggtcctgtctctcaagaatcccctgccactcctcacacccaccctgggcccatattcatttccatttgagttgttcttattgagtcatccttcctgtggtagcggaactcactaaggggcccatctggacccgaggtattgtgatgataaattctgagcacctaccccatccccagaagggctcagaaataaaataagagccaagtctagtcggtgtttcctgtcttgaaacacaatactgttggccctggaagaatgcacagaatctgtttgtaaggggatatgcacagaagctgcaagggacaggaggtgcaggagctgcaggcctcccccacccagcctgctctgccttggggaaaaccgtgggtgtgtcctgcaggccatgcaggcctgggacatgcaagcccataaccgctgtggcctcttggttttacagatacgaacctaaactttcaaaacctgtcagtgattgggttccgaatcctcctcctgaaagtggccgggtttaatctgctcatgacgctgcggctgtggtccagctgaggtgaggggccttgaagctgggagtggggtttagggacgcgggtctctgggtgcatcctaagctctgagagcaaacctccctgcagggtcttgcttttaagtccaaagcctgagcccaccaaactctcctacttcttcctgttacaaattcctcttgtgcaataataatggcctgaaacgctgtaaaatatcctcatttcagccgcctcagttgcacttctcccctatgaggtaggaagaacagttgtttagaaacgaagaaactgaggccccacagctaatgagtggaggaagagagacacttgtgtacaccacatgccttgtgttgtacttctctcaccgtgtaacctcctcatgtcctctctccccagtacggctctcttagctcagtagaaagaagacattacactcatattacaccccaatcctggctagagtctccgcaccctcctcccccagggtccccagtcgtcttgctgacaactgcatcctgttccatcaccatcaaaaaaaaactccaggctgggtgcgggggctcacacctgtaatcccagcactttgggaggcagaggcaggaggagcacaggagctggagaccagcctgggcaacacagggagaccccgcctctacaaaaagtgaaaaaattaaccaggtgtggtgctgcacacctgtagtcccagctacttaagaggctgagatgggaggatcgcttgagccctggaatgttgaggctacaatgagctgtgattgcgtcactgcactccagcctggaagacaaagcaagatcctgtctcaaataataaaaaaaataagaactccagggtacatttgctcctagaactctaccacatagccccaaacagagccatcaccatcacatccctaacagtcctgggtcttcctcagtgtccagcctgacttctgttcttcctcattccagatctgcaagattgtaagacagcctgtgctccctcgctccttcctctgcattgcccctcttctccctctccaaacagagggaactctcctacccccaaggaggtgaaagctgctaccacctctgtgcccccccggcaatgccaccaactggatcctacccgaatttatgattaagattgctgaagagctgccaaacactgctgccaccccctctgttcccttattgctgcttgtcactgcctgacattcacggcagaggcaaggctgctgcagcctcccctggctgtgcacattccctcctgctccccagagactgcctccgccatcccacagatgatggatcttcagtgggttctcttgggctctaggtcctgcagaatgttgtgaggggtttatttttttttaatagtgttcataaagaaatacatagtattcttcttctcaagacgtggggggaaattatctcattatcgaggccctgctatgctgtgtatctgggcgtgttgtatgtcctgctgccgatgccttcattaaaatgatttggaagagcaga

SEQ ID NO: 473 - DNA, 1508 bp, Homo sapiens
  source 1..1508: mol_type = genomic DNA
ttttgaaacccttcaaaggcagagacttgtccagcctaacctgcctgctgctcctagctcctgaggctcagggcccttggcttctgtccgctctgctcagggccctccagcgtggccactgctcagccatgctcctgctgctcgtcccagtgctcgaggtgatttttaccctgggaggaaccagagcccagtcggtgacccagcttggcagccacgtctctgtctctgaaggagccctggttctgctgaggtgcaactactcatcgtctgttccaccatatctcttctggtatgtgcaataccccaaccaaggactccagcttctcctgaagtacacatcagcggccaccctggttaaaggcatcaacggttttgaggctgaatttaagaagagtgaaacctccttccacctgacgaaaccctcagcccatatgagcgacgcggctgagtacttctgtgctgtgagtgatctcgaaccgaacagcagtgcttccaagataatctttggatcagggaccagactcagcatccggccaaatatccagaaccctgaccctgccgtgtaccagctgagagactctaaatccagtgacaagtctgtctgcctattcaccgattttgattctcaaacaaatgtgtcacaaagtaaggattctgatgtgtatatcacagacaaaactgtgctagacatgaggtctatggacttcaagagcaacagtgctgtggcctggagcaacaaatctgactttgcatgtgcaaacgccttcaacaacagcattattccagaagacaccttcttccccagcccagaaagttcctgtgatgtcaagctggtcgagaaaagctttgaaacagatacgaacctaaactttcaaaacctgtcagtgattgggttccgaatcctcctcctgaaagtggccgggtttaatctgctcatgacgctgcggctgtggtccagctgagatctgcaagattgtaagacagcctgtgctccctcgctccttcctctgcattgcccctcttctccctctccaaacagagggaactctcctacccccaaggaggtgaaagctgctaccacctctgtgcccccccggtaatgccaccaactggatcctacccgaatttatgattaagattgctgaagagctgccaaacactgctgccaccccctctgttcccttattgctgcttgtcactgcctgacattcacggcagaggcaaggctgctgcagcctcccctggctgtgcacattccctcctgctccccagagactgcctccgccatcccacagatgatggatcttcagtgggttctcttgggctctaggtcctggagaatgttgtgaggggtttatttttttttaatagtgttcataaagaaatacatagtattcttcttctcaagacgtggggggaaattatctcattatcgaggccctgctatgctgtgtgtctgggcgtgttgtatgtcctgctgccgatgccttcattaaaatgatttggaa

SEQ ID NO: 474 - protein, 748 aa, Homo sapiens
MASSRCPAPRGCRCLPGASLAWLGTVLLLLADWVLLRTALPRIFSLLVPTALPLLRVWAVGLSRWAVLWLGACGVLRATVGSKSENAGAQGWLAALKPLAAALGLALPGLALFRELISWGAPGSADSTRLLHWGSHPTAFVVSYAAALPAAALWHKLGSLWVPGGQGGSGNPVRRLLGCLGSETRRLSLFLVLVVLSSLGEMAIPFFTGRLTDWILQDGSADTFTRNLTLMSILTIASAVLEFVGDGIYNNTMGHVHSHLQGEVFGAVLRQETEFFQQNQTGNIMSRVTEDTSTLSDSLSENLSLFLWYLVRGLCLLGIMLWGSVSLTMVTLITLPLLFLLPKKVGKWYQLLEVQVRESLAKSSQVAIEALSAMPTVRSFANEEGEAQKFREKLQEIKTLNQKEAVAYAVNSWTTSISGMLLKVGILYIGGQLVTSGAVSSGNLVTFVLYQMQFTQAVEVLLSIYPRVQKAVGSSEKIFEYLDRTPRCPPSGLLTPLHLEGLVQFQDVSFAYPNRPDVLVLQGLTFTLRPGEVTALVGPNGSGKSTVAALLQNLYQPTGGQLLLDGKPLPQYEHRYLHRQVAAVGQEPQVFGRSLQENIAYGLTQKPTMEEITAAAVKSGAHSFISGLPQGYDTEVDEAGSQLSGGQRQAVALARALIRKPCVLILDDATSALDANSQLQVEQLLYESPERYSRSVLLITQHLSLVEQADHILFLEGGAIREGGTHQQLMEKKGCYWAMVQAPADAPE

SEQ ID NO: 475 - DNA, 2685 bp, Homo sapiens
  source 1..2685: mol_type = genomic DNA
gcttcaggccccaccggggcgcggagagtcccaggcccggccgggaccgggacggcgtccgagtgccaatggctagctctaggtgtcccgctccccgcgggtgccgctgcctccccggagcttctctcgcatggctggggacagtactgctacttctcgccgactgggtgctgctccggaccgcgctgccccgcatattctccctgctggtgcccaccgcgctgccactgctccgggtctgggcggtgggcctgagccgctgggccgtgctctggctgggggcctgcggggtcctcagggcaacggttggctccaagagcgaaaacgcaggtgcccagggctggctggctgctttgaagccattagctgcggcactgggcttggccctgccgggacttgccttgttccgagagctgatctcatggggagcccccgggtccgcggatagcaccaggctactgcactggggaagtcaccctaccgccttcgttgtcagttatgcagcggcactgcccgcagcagccctgtggcacaaactcgggagcctctgggtgcccggcggtcagggcggctctggaaaccctgtgcgtcggcttctaggctgcctgggctcggagacgcgccgcctctcgctgttcctggtcctggtggtcctctcctctcttggggagatggccattccattctttacgggccgcctcactgactggattctacaagatggctcagccgataccttcactcgaaacttaactctcatgtccattctcaccatagccagtgcagtgctggagttcgtgggtgacgggatctataacaacaccatgggccacgtgcacagccacttgcagggagaggtgtttggggctgtcctgcgccaggagacggagtttttccaacagaaccagacaggtaacatcatgtctcgggtaacagaggacacgtccaccctgagtgattctctgagtgagaatctgagcttatttctgtggtacctggtgcgaggcctatgtctcttggggatcatgctctggggatcagtgtccctcaccatggtcaccctgatcaccctgcctctgcttttccttctgcccaagaaggtgggaaaatggtaccagttgctggaagtgcaggtgcgggaatctctggcaaagtccagccaggtggccattgaggctctgtcggccatgcctacagttcgaagctttgccaacgaggagggcgaagcccagaagtttagggaaaagctgcaagaaataaagacactcaaccagaaggaggctgtggcctatgcagtcaactcctggaccactagtatttcaggtatgctgctgaaagtgggaatcctctacattggtgggcagctggtgaccagtggggctgtaagcagtgggaaccttgtcacatttgttctctaccagatgcagttcacccaggctgtggaggtactgctctccatctaccccagagtacagaaggctgtgggctcctcagagaaaatatttgagtacctggaccgcacccctcgctgcccacccagtggtctgttgactcccttacacttggagggccttgtccagttccaagatgtctcctttgcctacccaaaccgcccagatgtcttagtgctacaggggctgacattcaccctacgccctggcgaggtgacggcgctggtgggacccaatgggtctgggaagagcacagtggctgccctgctgcagaatctgtaccagcccaccgggggacagctgctgttggatgggaagccccttccccaatatgagcaccgctacctgcacaggcaggtggctgcagtgggacaagagccacaggtatttggaagaagtcttcaagaaaatattgcctatggcctgacccagaagccaactatggaggaaatcacagctgctgcagtaaagtctggggcccatagtttcatctctggactccctcagggctatgacacagaggtagacgaggctgggagccagctgtcagggggtcagcgacaggcagtggcgttggcccgagcattgatccggaaaccgtgtgtacttatcctggatgatgccaccagtgccctggatgcaaacagccagttacaggtggagcagctcctgtacgaaagccctgagcggtactcccgctcagtgcttctcatcacccagcacctcagcctggtggagcaggctgaccacatcctctttctggaaggaggcgctatccgggaggggggaacccaccagcagctcatggagaaaaaggggtgctactgggccatggtgcaggctcctgcagatgctccagaatgaaagccttctcagacctgcgcactccatctccctcccttttcttctctctgtggtggagaaccacagctgcagagtaggcagctgcctccaggatgagttacttgaaatttgccttgagtgtgttacctcctttccaagctcctcgtgataatgcagacttcctggagtacaaacacaggatttgtaattccttactgtaacggagtttagagccagggctgatgctttggtgtggccagcactctgaaactgagaaatgttcagaatgtacggaaagatgatcagctattttcaacataactgaaggcatatgctggcccataaacaccctgtaggttcttgatatttataataaaattggtgttttgta

SEQ ID NO: 476 - protein, 703 aa, Homo sapiens
MRLPDLRPWTSLLLVDAALLWLLQGPLGTLLPQGLPGLWLEGTLRLGGLWGLLKLRGLLGFVGTLLLPLCLATPLTVSLRALVAGASRAPPARVASAPWSWLLVGYGAAGLSWSLWAVLSPPGAQEKEQDQVNNKVLMWRLLKLSRPDLPLLVAAFFFLVLAVLGETLIPHYSGRVIDILGGDFDPHAFASAIFFMCLFSFGSSLSAGCRGGCFTYTMSRINLRIREQLFSSLLRQDLGFFQETKTGELNSRLSSDTTLMSNWLPLNANVLLRSLVKVVGLYGFMLSISPRLTLLSLLHMPFTIAAEKVYNTRHQEVLREIQDAVARAGQVVREAVGGLQTVRSFGAEEHEVCRYKEALEQCRQLYWRRDLERALYLLVRRVLHLGVQMLMLSCGLQQMQDGELTQGSLLSFMIYQESVGSYVQTLVYIYGDMLSNVGAAEKVFSYMDRQPNLPSPGTLAPTTLQGVVKFQDVSFAYPNRPDRPVLKGLTFTLRPGEVTALVGPNGSGKSTVAALLQNLYQPTGGQVLLDEKPISQYEHCYLHSQVVSVGQEPVLFSGSVRNNIAYGLQSCEDDKVMAAAQAAHADDFIQEMEHGIYTDVGEKGSQLAAGQKQRLAIARALVRDPRVLILDEATSALDVQCEQALQDWNSRGDRTVLVIAHRLQAVQRAHQILVLQEGKLQKLAQLQEGQDLYSRLVQQRLMD

SEQ ID NO: 477 - DNA, 5679 bp, Homo sapiens
  source 1..5679: mol_type = genomic DNA
gcccgccctggccgagcgtagctggcggaccagagccggtagcgaggttgggagagacggagcggacctcagcgctgaagcagaagtccccggagctgcggtctccccgccgcggctgagccatgcggctccctgacctgagaccctggacctccctgctgctggtggacgcggctttactgtggctgcttcagggccctctggggactttgcttcctcaagggctgccaggactatggctggaggggaccctgcggctgggagggctgtgggggctgctaaagctaagagggctgctgggatttgtggggacactgctgctcccgctctgtctggccacccccctgactgtctccctgagagccctggtcgcgggggcctcacgtgctcccccagccagagtcgcttcagccccttggagctggctgctggtggggtacggggctgcggggctcagctggtcactgtgggctgttctgagccctcctggagcccaggagaaggagcaggaccaggtgaacaacaaagtcttgatgtggaggctgctgaagctctccaggccggacctgcctctcctcgttgccgccttcttcttccttgtccttgctgttttgggtgagacattaatccctcactattctggtcgtgtgattgacatcctgggaggtgattttgacccccatgcctttgccagtgccatcttcttcatgtgcctcttctcctttggcagctcactgtctgcaggctgccgaggaggctgcttcacctacaccatgtctcgaatcaacttgcggatccgggagcagcttttctcctccctgctgcgccaggacctcggtttcttccaggagactaagacaggggagctgaactcacggctgagctcggataccaccctgatgagtaactggcttcctttaaatgccaatgtgctcttgcgaagcctggtgaaagtggtggggctgtatggcttcatgctcagcatatcgcctcgactcaccctcctttctctgctgcacatgcccttcacaatagcagcggagaaggtgtacaacacccgccatcaggaagtgcttcgggagatccaggatgcagtggccagggcggggcaggtggtgcgggaagccgttggagggctgcagaccgttcgcagttttggggccgaggagcatgaagtctgtcgctataaagaggcccttgaacaatgtcggcagctgtattggcggagagacctggaacgcgccttgtacctgctcgtaaggagggtgctgcacttgggggtgcagatgctgatgctgagctgtgggctgcagcagatgcaggatggggagctcacccagggcagcctgctttcctttatgatctaccaggagagcgtggggagctatgtgcagaccctggtatacatatatggggatatgctcagcaacgtgggagctgcagagaaggttttctcctacatggaccgacagccaaatctgccttcacctggcacgcttgcccccaccactctgcagggggttgtgaaattccaagacgtctcctttgcatatcccaatcgccctgacaggcctgtgctcaaggggctgacgtttaccctacgtcctggtgaggtgacggcgctggtgggacccaatgggtctgggaagagcacagtggctgccctgctgcagaatctgtaccagcccacagggggacaggtgctgctggatgaaaagcccatctcacagtatgaacactgctacctgcacagccaggtggtttcagttgggcaggagcctgtgctgttctccggttctgtgaggaacaacattgcttatgggctgcagagctgcgaagatgataaggtgatggcggctgcccaggctgcccacgcagatgacttcatccaggaaatggagcatggaatatacacagatgtaggggagaagggaagccagctggctgcgggacagaaacaacgtctggccattgcccgggcccttgtacgagacccgcgggtcctcatcctggatgaggctactagtgccctagatgtgcagtgcgagcaggccctgcaggactggaattcccgtggggatcgcacagtgctggtgattgctcacaggctgcaggcagttcagcgcgcccaccagatcctggtgctccaggagggcaagctgcagaagcttgcccagctccaggagggacaggacctctattcccgcctggttcagcagcggctgatggactgaggccccagggatactgggccctcttctcaggggcgtctccaggacccagagctgttcctgctttgagtttccctagagctgtgcggccagatagctgttcctgagttgcaggcacgatggagatttggacactgtgtgcttttggtggggtagagaggtggggtggggtggggtgggggctgtctgtgtccaggaaacttaattccctggtgactagagctttgcctggtgatgaggagtattttgtggcataatacatatattttaaaatattttccttcttacatgaactgtatacattcatatagaaaatttagacaatataaaaaagtacaaagaagaaaagtaaaagtacccattgtttcacttcctggagataaccatagttgctattttgctgcctgtcccatcagtcgtttatctgttgtttgagatagaaattaaccaaaaatgacataaatattcatgagattgccttcctatatccttccttgttcctaccagtgtctgctattttgaagaagctagggtctggagggacagagaacagttccctgattaacagtattaatagcgacattggtaacagctaccatttatagagttttaatgggagtaggagctatgctaagtgtttttcatgtattatcgtttttaatcattatccccaaccctatgaggttggttattatccccattttacagatgaggaaactgaagctcaaagaggctcaatgactttcccaaggtggtcgtagtggtggagttggagtttgaacacaggcctgaccctagagtccacaccctgacccaatcaattatattgcatcttgggtccataaaccctaatccataatcccatcaagaaaagctctgctgctcttagctctaaataattcagaatctattctcttctctccagtcccgttgttatagtcttcactcatagacttaagatgatcccatcaccagagaggtttctctaccattagcttccctcttccggccattcttcacaaagtcatttttctaaattctgtgtcacatacgatgatggcatttctggaaattccttcaggtgctctcaagccctgctgcagagatccttttcagagcacacactgttccagcccatctgtctcaccctctcctgttgtatccagctccacgacaaacttctgccttccccaacacctttgtgcctttgcatatggtgttttcttgcccattttctgctcgactcgcccctgattttcaagttcaagacttaactcagggttcaggtcttccaggaggccttacttatgtcgtcagtctggggaactctccatgtgcttctatcactgtgcggttacctctttcacagcccttttaaagttctatcttccctttcccaccttttttgaccttccactagaccatgagcacctgggcggaaagccatatatcttattaagctttatatctgctacctggccgagggcctaattcatagtggagaataaatagtcaattgaataaatgaataaatatctccaccatcgtactaatcttaatcctccctgcccactcccaccactgaaaatgcaacattgtacacatcactggttgttgggagggacttaccttggaaagttgctattctaggaaagagaaaccttcatattcctggaaacagcaggtagtttccagtgctggcaatgaattccccagaactgctgttttggattttttcttgcctggcagctgttgggagcagggtgcagtgaggatggggtgagagtgggcagtttcttgtgcagatttgcctttctttcatcctggggctgacttgcagctccacacccatccatctctcaaatttcacagagggtaaaataggcatttggagagaaagaactctggcctgattcctttctctcccacaaatgtcctttattcataaaacaggaataataattcctgtatctcccaactacatggaagctgcagccctcacagaagaagatgatctgagaaattctttgatttcctcagtacagttatacccatgcatcataatactttaagcctggaaggcatcttaaaaataatgcaacagtcaaacctaattttacagagaaactgacatgaaatcacgcagctaatcatgataaagctgggtggaaaacttatcttgatgggcagtacaggaagatgcagtagaccttaagatgtcctgaaagtttcttatctcaggggaaactcccaggtaggctttatgtcagggacacagaaaaatgctccctgaaagtcaaaatattcgggctagacagacaaattcctgtaagtgtggtttgtctgggaaccacagatgtcactaatcctggtttgctccagagttctttttgttcactcctaccccccatcaccatttgattgatctccttaccctgtaatttccccttcttgtcgcttacctgcagtatctttcccacccaggcatgccttattctttctaaaggaaagtatgaatggagaggggaaagcttgggaaactgatagatttccttggatgccaaaacacctccatagcctgtctgcccggccctatgtggaaacagcattgagtttcaagtcctttatgcctccacccagggatagccacttgtaatccacatggcaattgtgaaacaagcaggaaatgcgtaattgtcagaattttgtggggaaaggactagggaataaggaaaacaaagatcttccttgtgttttagagctgtcagctagaggagcacctgcttgagtctgatgccatctaatggtcccagaagaaactgggttttgaacctagagttccatggactcttaggaattagactactactactactaagcattcactggtgcttactatgtgctattgctgtgccaagtatctgaaacctgtcttcttaccttatttttcaagataattctatgtggcaggtattactatctcaattctaagagtgagaaaatggagttttagaaacatttactaacttgcctgggtcacatagctaaggaagaggtggacttgcccagctttgcataaaactcctcaaaagagttgcctatactccctgactccacttatcttcctactatcctctttttaaaatatattatttatttatttaaataagcaatatatgaatgtggtttgaaattcaaaagacacaaagaagtatacagaggaaagcctcactctcaatccttctcaaggtttgctaattcctcttgcataggcaatccgttcttccagctttgtgtttatctttccagagaagtttactgtgtattaagcaaatatgtatatctttattcttgctcagtattttcgcaaacagcagctgtctaagttcactgttctgaactttattttttaaattaaaaatatatggctatgtagtattctatttta

SEQ ID NO: 478 - protein, 15 aa, synthetic construct
GGGGSGGGGSGGGGS

SEQ ID NO: 479 - protein, 20 aa, synthetic construct
METDTLLLWVLLLWVPGSTG

SEQ ID NO: 480 - RNA, 20 nt, synthetic construct
  source 1..20: mol_type = other RNA
agacctggctatggtgagaa

SEQ ID NO: 481 - RNA, 20 nt, synthetic construct
  source 1..20: mol_type = other RNA
gcactgcactataaagaacc

SEQ ID NO: 482 - RNA, 20 nt, synthetic construct
  source 1..20: mol_type = other RNA
tagtgcagtgctggagttcg

SEQ ID NO: 483 - RNA, 20 nt, synthetic construct
  source 1..20: mol_type = other RNA
agaaacctgtctggttctgt

SEQ ID NO: 484 - RNA, 20 nt, synthetic construct
  source 1..20: mol_type = other RNA
tgatgttacctgcagggttg

SEQ ID NO: 485 - RNA, 20 nt, synthetic construct
  source 1..20: mol_type = other RNA
ctgcaggtaacatcatgtct

SEQ ID NO: 486 - RNA, 20 nt, synthetic construct
  source 1..20: mol_type = other RNA
accaggtatgttcatggagt

SEQ ID NO: 487 - RNA, 20 nt, synthetic construct
  source 1..20: mol_type = other RNA
ttccagcaactgtggataca

SEQ ID NO: 488 - RNA, 20 nt, synthetic construct
  source 1..20: mol_type = other RNA
tccacagttgctggaagtgc

SEQ ID NO: 489 - RNA, 20 nt, synthetic construct
  source 1..20: mol_type = other RNA
ggtgctcacactagtggtcc

SEQ ID NO: 490 - RNA, 20 nt, synthetic construct
  source 1..20: mol_type = other RNA
gggacctcacctccacagcc

SEQ ID NO: 491 - RNA, 20 nt, synthetic construct
  source 1..20: mol_type = other RNA
ggacctcacctccacagcct

SEQ ID NO: 492 - RNA, 20 nt, synthetic construct
  source 1..20: mol_type = other RNA
atacctgcctgtgcaggtag

SEQ ID NO: 493 - RNA, 20 nt, synthetic construct
  source 1..20: mol_type = other RNA
gcttccatacctgcctgtgc

SEQ ID NO: 494 - RNA, 20 nt, synthetic construct
  source 1..20: mol_type = other RNA
tcatctcaggtggctgcagt

SEQ ID NO: 495 - RNA, 20 nt, synthetic construct
  source 1..20: mol_type = other RNA
ttcatctcaggtggctgcag

SEQ ID NO: 496 - RNA, 20 nt, synthetic construct
  source 1..20: mol_type = other RNA
gtacctgtgtcatagccctg

SEQ ID NO: 497 - RNA, 20 nt, synthetic construct
  source 1..20: mol_type = other RNA
gtctacctctgcagagcaaa

SEQ ID NO: 498 - RNA, 20 nt, synthetic construct
  source 1..20: mol_type = other RNA
cgtctacctctgcagagcaa

SEQ ID NO: 499 - RNA, 20 nt, synthetic construct
  source 1..20: mol_type = other RNA
ctgcagaggtagacgaggct

SEQ ID NO: 500 - RNA, 20 nt, synthetic construct
  source 1..20: mol_type = other RNA
tctgcagaggtagacgaggc

SEQ ID NO: 501 - RNA, 20 nt, synthetic construct
  source 1..20: mol_type = other RNA
ttgctctgcagaggtagacg

SEQ ID NO: 502 - RNA, 20 nt, synthetic construct
  source 1..20: mol_type = other RNA
ctccacctgaggaaagacat

SEQ ID NO: 503 - RNA, 20 nt, synthetic construct
  source 1..20: mol_type = other RNA
ctgactcacccaaaacagca

SEQ ID NO: 504 - RNA, 20 nt, synthetic construct
  source 1..20: mol_type = other RNA
cacccaaaacagcaaggaca

SEQ ID NO: 505 - RNA, 20 nt, synthetic construct
  source 1..20: mol_type = other RNA
cctacctgccaaaggagaag

SEQ ID NO: 506 - RNA, 20 nt, synthetic construct
  source 1..20: mol_type = other RNA
ccccacagctcactgtctgc

SEQ ID NO: 507 - RNA, 20 nt, synthetic construct
  source 1..20: mol_type = other RNA
cagacagtgagctgtggggt

SEQ ID NO: 508 - RNA, 20 nt, synthetic construct
  source 1..20: mol_type = other RNA
ccccacctgtcttagtctcc

SEQ ID NO: 509 - RNA, 20 nt, synthetic construct
  source 1..20: mol_type = other RNA
tcttaggggagctgaactca

SEQ ID NO: 510 - RNA, 20 nt, synthetic construct
  source 1..20: mol_type = other RNA
tcccctaagaaggacagagc

SEQ ID NO: 511 - RNA, 20 nt, synthetic construct
  source 1..20: mol_type = other RNA
atcaggtgagcgtgcatgta

SEQ ID NO: 512 - RNA, 20 nt, synthetic construct
  source 1..20: mol_type = other RNA
tcttccaggtgctgcacttg

SEQ ID NO: 513 - RNA, 20 nt, synthetic construct
  source 1..20: mol_type = other RNA
ctcttccaggtgctgcactt

SEQ ID NO: 514 - RNA, 20 nt, synthetic construct
  source 1..20: mol_type = other RNA
cctcttccaggtgctgcact

SEQ ID NO: 515 - RNA, 20 nt, synthetic construct
  source 1..20: mol_type = other RNA
cttccaggtgctgcacttgg

SEQ ID NO: 516 - RNA, 20 nt, synthetic construct
  source 1..20: mol_type = other RNA
cagggtctggaaaacaggaa

SEQ ID NO: 517 - RNA, 20 nt, synthetic construct
  source 1..20: mol_type = other RNA
agggtctggaaaacaggaat

SEQ ID NO: 518 - RNA, 20 nt, synthetic construct
  source 1..20: mol_type = other RNA
ctttcaggcaccttgagcac

SEQ ID NO: 519 - RNA, 20 nt, synthetic construct
  source 1..20: mol_type = other RNA
cctcacccacctggctgtgc

SEQ ID NO: 520 - RNA, 20 nt, synthetic construct
  source 1..20: mol_type = other RNA
ctgcacaggtggtttcagtt

SEQ ID NO: 521 - RNA, 20 nt, synthetic construct
  source 1..20: mol_type = other RNA
gctgcacaggtggtttcagt

SEQ ID NO: 522 - RNA, 20 nt, synthetic construct
  source 1..20: mol_type = other RNA
ccacctgtgcagcagggaca

SEQ ID NO: 523 - RNA, 20 nt, synthetic construct
  source 1..20: mol_type = other RNA
cacctgtgcagcagggacag

SEQ ID NO: 524 - RNA, 20 nt, synthetic construct
  source 1..20: mol_type = other RNA
accacctgtgcagcagggac

SEQ ID NO: 525 - RNA, 20 nt, synthetic construct
  source 1..20: mol_type = other RNA
tcctcagatgtaggggagaa

SEQ ID NO: 526 - RNA, 20 nt, synthetic construct
  source 1..20: mol_type = other RNA
ttcctcagatgtaggggaga

SEQ ID NO: 527 - RNA, 20 nt, synthetic construct
  source 1..20: mol_type = other RNA
tcgccgactgggtgctgctc

SEQ ID NO: 528 - RNA, 20 nt, synthetic construct
  source 1..20: mol_type = other RNA
gtgctcttcccagacccatt

SEQ ID NO: 529 - RNA, 20 nt, synthetic construct
  source 1..20: mol_type = other RNA
tgtgctcttcccagacccat

SEQ ID NO: 530 - RNA, 20 nt, synthetic construct
  source 1..20: mol_type = other RNA
tgggtctgggaagagcacag

SEQ ID NO: 531 - RNA, 20 nt, synthetic construct
  source 1..20: mol_type = other RNA
gtcgctgaccccctgacagc

SEQ ID NO: 532 - RNA, 20 nt, synthetic construct
  source 1..20: mol_type = other RNA
tcagcgacaggcagtggcgt

SEQ ID NO: 533 - RNA, 20 nt, synthetic construct
  source 1..20: mol_type = other RNA
ggataagtacacacggtttc

SEQ ID NO: 534 - RNA, 20 nt, synthetic construct
  source 1..20: mol_type = other RNA
tcatccaggataagtacaca

SEQ ID NO: 535 - RNA, 20 nt, synthetic construct
  source 1..20: mol_type = other RNA
gggcactggtggcatcatcc

SEQ ID NO: 536 - RNA, 20 nt, synthetic construct
  source 1..20: mol_type = other RNA
gtttgcatccagggcactgg

SEQ ID NO: 537 - RNA, 20 nt, synthetic construct
  source 1..20: mol_type = other RNA
catcacccagcacctcagcc

SEQ ID NO: 538 - RNA, 20 nt, synthetic construct
  source 1..20: mol_type = other RNA
cacccagcacctcagcctgg

SEQ ID NO: 539 - RNA, 19 nt, synthetic construct
  source 1..19: mol_type = other RNA
ggtggacgcggctttactg

SEQ ID NO: 540 - RNA, 20 nt, synthetic construct
  source 1..20: mol_type = other RNA
tgcgggacagaaacaacgtc

SEQ ID NO: 541 - RNA, 20 nt, synthetic construct
  source 1..20: mol_type = other RNA
ggacccgcgggtctcgtaca

SEQ ID NO: 542 - RNA, 20 nt, synthetic construct
  source 1..20: mol_type = other RNA
catccaggatgaggacccgc

SEQ ID NO: 543 - RNA, 20 nt, synthetic construct
  source 1..20: mol_type = other RNA
tcatccaggatgaggacccg

SEQ ID NO: 544 - RNA, 20 nt, synthetic construct
  source 1..20: mol_type = other RNA
gcgggtcctcatcctggatg

SEQ ID NO: 545 - RNA, 20 nt, synthetic construct
  source 1..20: mol_type = other RNA
gggcactagtagcctcatcc

SEQ ID NO: 546 - RNA, 20 nt, synthetic construct
  source 1..20: mol_type = other RNA
cctagatgtgcagtgcgagc

SEQ ID NO: 547 - RNA, 20 nt, synthetic construct
  source 1..20: mol_type = other RNA
actcacgctggatagcctcc

SEQ ID NO: 548 - RNA, 20 nt, synthetic construct
  source 1..20: mol_type = other RNA
cacagcccaagatagttaag

SEQ ID NO: 549 - RNA, 20 nt, synthetic construct
  source 1..20: mol_type = other RNA
acagcccaagatagttaagt

SEQ ID NO: 550 - RNA, 20 nt, synthetic construct
  source 1..20: mol_type = other RNA
cagcccaagatagttaagtg

SEQ ID NO: 551 - RNA, 20 nt, synthetic construct
  source 1..20: mol_type = other RNA
ttaccccacttaactatctt

SEQ ID NO: 552 - RNA, 20 nt, synthetic construct
  source 1..20: mol_type = other RNA
cttaccccacttaactatct

SEQ ID NO: 553 - RNA, 20 nt, synthetic construct
  source 1..20: mol_type = other RNA
tcgatctatgaaaaagacag

SEQ ID NO: 554 - RNA, 19 nt, synthetic construct
  source 1..19: mol_type = other RNA
ctcacgctggatagcctcc

SEQ ID NO: 555 - RNA, 18 nt, synthetic construct
  source 1..18: mol_type = other RNA
tcacgctggatagcctcc

SEQ ID NO: 556 - RNA, 20 nt, synthetic construct
  source 1..20: mol_type = other RNA
cgcgagcacagctaaggcca

SEQ ID NO: 557 - RNA, 20 nt, synthetic construct
  source 1..20: mol_type = other RNA
gagtagcgcgagcacagcta

SEQ ID NO: 558 - RNA, 20 nt, synthetic construct
  source 1..20: mol_type = other RNA
gctactctctctttctggcc

SEQ ID NO: 559 - RNA, 20 nt, synthetic construct
  source 1..20: mol_type = other RNA
cgtgagtaaacctgaatctt

SEQ ID NO: 560 - RNA, 20 nt, synthetic construct
  source 1..20: mol_type = other RNA
tttgactttccattctctgc

SEQ ID NO: 561 - RNA, 20 nt, synthetic construct
  source 1..20: mol_type = other RNA
acccagacacatagcaattc

SEQ ID NO: 562 - RNA, 20 nt, synthetic construct
  source 1..20: mol_type = other RNA
aagtcaacttcaatgtcgga

SEQ ID NO: 563 - RNA, 20 nt, synthetic construct
  source 1..20: mol_type = other RNA
cagtaagtcaacttcaatgt

SEQ ID NO: 564 - RNA, 20 nt, synthetic construct
  source 1..20: mol_type = other RNA
gaagttgacttactgaagaa

SEQ ID NO: 565 - RNA, 20 nt, synthetic construct
  source 1..20: mol_type = other RNA
tggagagagaattgaaaaag

SEQ ID NO: 566 - RNA, 20 nt, synthetic construct
  source 1..20: mol_type = other RNA
ttcagacttgtctttcagca

SEQ ID NO: 567 - RNA, 20 nt, synthetic construct
  source 1..20: mol_type = other RNA
acttgtctttcagcaaggac

SEQ ID NO: 568 - RNA, 20 nt, synthetic construct
  source 1..20: mol_type = other RNA
atactcatctttttcagtgg

SEQ ID NO: 569 - RNA, 20 nt, synthetic construct
  source 1..20: mol_type = other RNA
catactcatctttttcagtg

SEQ ID NO: 570 - RNA, 20 nt, synthetic construct
  source 1..20: mol_type = other RNA
gcatactcatctttttcagt

SEQ ID NO: 571 - RNA, 20 nt, synthetic construct
  source 1..20: mol_type = other RNA
ggcatactcatctttttcag

SEQ ID NO: 572 - RNA, 20 nt, synthetic construct
  source 1..20: mol_type = other RNA
agtcacatggttcacacggc

SEQ ID NO: 573 - RNA, 20 nt, synthetic construct
  source 1..20: mol_type = other RNA
acaaagtcacatggttcaca

SEQ ID NO: 574 - RNA, 20 nt, synthetic construct
  source 1..20: mol_type = other RNA
tgggctgtgacaaagtcaca

SEQ ID NO: 575 - RNA, 100 nt, synthetic construct
  source 1..100: mol_type = other RNA
agacctggctatggtgagaagttttagagctagaaatagcaagttaaaataaggctagtccgttatcaacttgaaaaagtggcaccgagtcggtgctttt

SEQ ID NO: 576 - RNA, 100 nt, synthetic construct
  source 1..100: mol_type = other RNA
gcactgcactataaagaaccgttttagagctagaaatagcaagttaaaataaggctagtccgttatcaacttgaaaaagtggcaccgagtcggtgctttt

SEQ ID NO: 577 - RNA, 100 nt, synthetic construct
  source 1..100: mol_type = other RNA
tagtgcagtgctggagttcggttttagagctagaaatagcaagttaaaataaggctagtccgttatcaacttgaaaaagtggcaccgagtcggtgctttt

SEQ ID NO: 578 - RNA, 100 nt, synthetic construct
  source 1..100: mol_type = other RNA
agaaacctgtctggttctgtgttttagagctagaaatagcaagttaaaataaggctagtccgttatcaacttgaaaaagtggcaccgagtcggtgctttt

SEQ ID NO: 579 - RNA, 100 nt, synthetic construct
  source 1..100: mol_type = other RNA
tgatgttacctgcagggttggttttagagctagaaatagcaagttaaaataaggctagtccgttatcaacttgaaaaagtggcaccgagtcggtgctttt

SEQ ID NO: 580 - RNA, 100 nt, synthetic construct
  source 1..100: mol_type = other RNA
ctgcaggtaacatcatgtctgttttagagctagaaatagcaagttaaaataaggctagtccgttatcaacttgaaaaagtggcaccgagtcggtgctttt

SEQ ID NO: 581 - RNA, 100 nt, synthetic construct
  source 1..100: mol_type = other RNA
accaggtatgttcatggagtgttttagagctagaaatagcaagttaaaataaggctagtccgttatcaacttgaaaaagtggcaccgagtcggtgctttt

SEQ ID NO: 582 - RNA, 100 nt, synthetic construct
  source 1..100: mol_type = other RNA
ttccagcaactgtggatacagttttagagctagaaatagcaagttaaaataaggctagtccgttatcaacttgaaaaagtggcaccgagtcggtgctttt

SEQ ID NO: 583 - RNA, 100 nt, synthetic construct
  source 1..100: mol_type = other RNA
tccacagttgctggaagtgcgttttagagctagaaatagcaagttaaaataaggctagtccgttatcaacttgaaaaagtggcaccgagtcggtgctttt

SEQ ID NO: 584 - RNA, 100 nt, synthetic construct
  source 1..100: mol_type = other RNA
ggtgctcacactagtggtccgttttagagctagaaatagcaagttaaaataaggctagtccgttatcaacttgaaaaagtggcaccgagtcggtgctttt

SEQ ID NO: 585 - RNA, 100 nt, synthetic construct
  source 1..100: mol_type = other RNA
gggacctcacctccacagccgttttagagctagaaatagcaagttaaaataaggctagtccgttatcaacttgaaaaagtggcaccgagtcggtgctttt

SEQ ID NO: 586 - RNA, 100 nt, synthetic construct
  source 1..100: mol_type = other RNA
ggacctcacctccacagcctgttttagagctagaaatagcaagttaaaataaggctagtccgttatcaacttgaaaaagtggcaccgagtcggtgctttt

SEQ ID NO: 587 - RNA, 100 nt, synthetic construct
  source 1..100: mol_type = other RNA
atacctgcctgtgcaggtaggttttagagctagaaatagcaagttaaaataaggctagtccgttatcaacttgaaaaagtggcaccgagtcggtgctttt

SEQ ID NO: 588 - RNA, 100 nt, synthetic construct
  source 1..100: mol_type = other RNA
gcttccatacctgcctgtgcgttttagagctagaaatagcaagttaaaataaggctagtccgttatcaacttgaaaaagtggcaccgagtcggtgctttt

SEQ ID NO: 589 - RNA, 100 nt, synthetic construct
  source 1..100: mol_type = other RNA
tcatctcaggtggctgcagtgttttagagctagaaatagcaagttaaaataaggctagtccgttatcaacttgaaaaagtggcaccgagtcggtgctttt

SEQ ID NO: 590 - RNA, 100 nt, synthetic construct
  source 1..100: mol_type = other RNA
ttcatctcaggtggctgcaggttttagagctagaaatagcaagttaaaataaggctagtccgttatcaacttgaaaaagtggcaccgagtcggtgctttt

SEQ ID NO: 591 - RNA, 100 nt, synthetic construct
  source 1..100: mol_type = other RNA
gtacctgtgtcatagccctggttttagagctagaaatagcaagttaaaataaggctagtccgttatcaacttgaaaaagtggcaccgagtcggtgctttt

SEQ ID NO: 592 - RNA, 100 nt, synthetic construct
  source 1..100: mol_type = other RNA
gtctacctctgcagagcaaagttttagagctagaaatagcaagttaaaataaggctagtccgttatcaacttgaaaaagtggcaccgagtcggtgctttt

SEQ ID NO: 593 - RNA, 100 nt, synthetic construct
  source 1..100: mol_type = other RNA
cgtctacctctgcagagcaagttttagagctagaaatagcaagttaaaataaggctagtccgttatcaacttgaaaaagtggcaccgagtcggtgctttt

SEQ ID NO: 594 - RNA, 100 nt, synthetic construct
  source 1..100: mol_type = other RNA
ctgcagaggtagacgaggctgttttagagctagaaatagcaagttaaaataaggctagtccgttatcaacttgaaaaagtggcaccgagtcggtgctttt

SEQ ID NO: 595 - RNA, 100 nt, synthetic construct
  source 1..100: mol_type = other RNA
tctgcagaggtagacgaggcgttttagagctagaaatagcaagttaaaataaggctagtccgttatcaacttgaaaaagtggcaccgagtcggtgctttt

SEQ ID NO: 596 - RNA, 100 nt, synthetic construct
  source 1..100: mol_type = other RNA
ttgctctgcagaggtagacggttttagagctagaaatagcaagttaaaataaggctagtccgttatcaacttgaaaaagtggcaccgagtcggtgctttt

SEQ ID NO: 597 - RNA, 100 nt, synthetic construct
  source 1..100: mol_type = other RNA
ctccacctgaggaaagacatgttttagagctagaaatagcaagttaaaataaggctagtccgttatcaacttgaaaaagtggcaccgagtcggtgctttt

SEQ ID NO: 598 - RNA, 100 nt, synthetic construct
  source 1..100: mol_type = other RNA
ctgactcacccaaaacagcagttttagagctagaaatagcaagttaaaataaggctagtccgttatcaacttgaaaaagtggcaccgagtcggtgctttt

SEQ ID NO: 599 - RNA, 100 nt, synthetic construct
  source 1..100: mol_type = other RNA
cacccaaaacagcaaggacagttttagagctagaaatagcaagttaaaataaggctagtccgttatcaacttgaaaaagtggcaccgagtcggtgctttt

SEQ ID NO: 600 - RNA, 100 nt, synthetic construct
  source 1..100: mol_type = other RNA
cctacctgccaaaggagaaggttttagagctagaaatagcaagttaaaataaggctagtccgttatcaacttgaaaaagtggcaccgagtcggtgctttt

SEQ ID NO: 601 - RNA, 100 nt, synthetic construct
  source 1..100: mol_type = other RNA
ccccacagctcactgtctgcgttttagagctagaaatagcaagttaaaataaggctagtccgttatcaacttgaaaaagtggcaccgagtcggtgctttt

SEQ ID NO: 602 - RNA, 100 nt, synthetic construct
  source 1..100: mol_type = other RNA
cagacagtgagctgtggggtgttttagagctagaaatagcaagttaaaataaggctagtccgttatcaacttgaaaaagtggcaccgagtcggtgctttt

SEQ ID NO: 603 - RNA, 100 nt, synthetic construct
  source 1..100: mol_type = other RNA
ccccacctgtcttagtctccgttttagagctagaaatagcaagttaaaataaggctagtccgttatcaacttgaaaaagtggcaccgagtcggtgctttt

SEQ ID NO: 604 - RNA, 100 nt, synthetic construct
  source 1..100: mol_type = other RNA
tcttaggggagctgaactcagttttagagctagaaatagcaagttaaaataaggctagtccgttatcaacttgaaaaagtggcaccgagtcggtgctttt

SEQ ID NO: 605 - RNA, 100 nt, synthetic construct
  source 1..100: mol_type = other RNA
tcccctaagaaggacagagcgttttagagctagaaatagcaagttaaaataaggctagtccgttatcaacttgaaaaagtggcaccgagtcggtgctttt

SEQ ID NO: 606 - RNA, 100 nt, synthetic construct
  source 1..100: mol_type = other RNA
atcaggtgagcgtgcatgtagttttagagctagaaatagcaagttaaaataaggctagtccgttatcaacttgaaaaagtggcaccgagtcggtgctttt

SEQ ID NO: 607 - RNA, 100 nt, synthetic construct
  source 1..100: mol_type = other RNA
tcttccaggtgctgcacttggttttagagctagaaatagcaagttaaaataaggctagtccgttatcaacttgaaaaagtggcaccgagtcggtgctttt

SEQ ID NO: 608 - RNA, 100 nt, synthetic construct
  source 1..100: mol_type = other RNA
ctcttccaggtgctgcacttgttttagagctagaaatagcaagttaaaataaggctagtccgttatcaacttgaaaaagtggcaccgagtcggtgctttt

SEQ ID NO: 609 - RNA, 100 nt, synthetic construct
  source 1..100: mol_type = other RNA
cctcttccaggtgctgcactgttttagagctagaaatagcaagttaaaataaggctagtccgttatcaacttgaaaaagtggcaccgagtcggtgctttt

SEQ ID NO: 610 - RNA, 100 nt, synthetic construct
  source 1..100: mol_type = other RNA
cttccaggtgctgcacttgggttttagagctagaaatagcaagttaaaataaggctagtccgttatcaacttgaaaaagtggcaccgagtcggtgctttt

SEQ ID NO: 611 - RNA, 100 nt, synthetic construct
  source 1..100: mol_type = other RNA
cagggtctggaaaacaggaagttttagagctagaaatagcaagttaaaataaggctagtccgttatcaacttgaaaaagtggcaccgagtcggtgctttt

SEQ ID NO: 612 - RNA, 100 nt, synthetic construct
  source 1..100: mol_type = other RNA
agggtctggaaaacaggaatgttttagagctagaaatagcaagttaaaataaggctagtccgttatcaacttgaaaaagtggcaccgagtcggtgctttt

SEQ ID NO: 613 - RNA, 100 nt, synthetic construct
  source 1..100: mol_type = other RNA
ctttcaggcaccttgagcacgttttagagctagaaatagcaagttaaaataaggctagtccgttatcaacttgaaaaagtggcaccgagtcggtgctttt

SEQ ID NO: 614 - RNA, 100 nt, synthetic construct
  source 1..100: mol_type = other RNA
cctcacccacctggctgtgcgttttagagctagaaatagcaagttaaaataaggctagtccgttatcaacttgaaaaagtggcaccgagtcggtgctttt

SEQ ID NO: 615 - RNA, 100 nt, synthetic construct
  source 1..100: mol_type = other RNA
ctgcacaggtggtttcagttgttttagagctagaaatagcaagttaaaataaggctagtccgttatcaacttgaaaaagtggcaccgagtcggtgctttt

SEQ ID NO: 616 - RNA, 100 nt, synthetic construct
  source 1..100: mol_type = other RNA
gctgcacaggtggtttcagtgttttagagctagaaatagcaagttaaaataaggctagtccgttatcaacttgaaaaagtggcaccgagtcggtgctttt

SEQ ID NO: 617 - RNA, 100 nt, synthetic construct
  source 1..100: mol_type = other RNA
ccacctgtgcagcagggacagttttagagctagaaatagcaagttaaaataaggctagtccgttatcaacttgaaaaagtggcaccgagtcggtgctttt

SEQ ID NO: 618 - RNA, 100 nt, synthetic construct
  source 1..100: mol_type = other RNA
cacctgtgcagcagggacaggttttagagctagaaatagcaagttaaaataaggctagtccgttatcaacttgaaaaagtggcaccgagtcggtgctttt

SEQ ID NO: 619 - RNA, 100 nt, synthetic construct
  source 1..100: mol_type = other RNA
accacctgtgcagcagggacgttttagagctagaaatagcaagttaaaataaggctagtccgttatcaacttgaaaaagtggcaccgagtcggtgctttt

SEQ ID NO: 620 - RNA, 100 nt, synthetic construct
  source 1..100: mol_type = other RNA
tcctcagatgtaggggagaagttttagagctagaaatagcaagttaaaataaggctagtccgttatcaacttgaaaaagtggcaccgagtcggtgctttt

SEQ ID NO: 621 - RNA, 100 nt, synthetic construct
  source 1..100: mol_type = other RNA
ttcctcagatgtaggggagagttttagagctagaaatagcaagttaaaataaggctagtccgttatcaacttgaaaaagtggcaccgagtcggtgctttt

SEQ ID NO: 622 - RNA, 100 nt, synthetic construct
  source 1..100: mol_type = other RNA
tcgccgactgggtgctgctcgttttagagctagaaatagcaagttaaaataaggctagtccgttatcaacttgaaaaagtggcaccgagtcggtgctttt

SEQ ID NO: 623 - RNA, 100 nt, synthetic construct
  source 1..100: mol_type = other RNA
gtgctcttcccagacccattgttttagagctagaaatagcaagttaaaataaggctagtccgttatcaacttgaaaaagtggcaccgagtcggtgctttt

SEQ ID NO: 624 - RNA, 100 nt, synthetic construct
  source 1..100: mol_type = other RNA
tgtgctcttcccagacccatgttttagagctagaaatagcaagttaaaataaggctagtccgttatcaacttgaaaaagtggcaccgagtcggtgctttt

SEQ ID NO: 625 - RNA, 100 nt, synthetic construct
  source 1..100: mol_type = other RNA
tgggtctgggaagagcacaggttttagagctagaaatagcaagttaaaataaggctagtccgttatcaacttgaaaaagtggcaccgagtcggtgctttt

SEQ ID NO: 626 - RNA, 100 nt, synthetic construct
  source 1..100: mol_type = other RNA
gtcgctgaccccctgacagcgttttagagctagaaatagcaagttaaaataaggctagtccgttatcaacttgaaaaagtggcaccgagtcggtgctttt

SEQ ID NO: 627 - RNA, 100 nt, synthetic construct
  source 1..100: mol_type = other RNA
tcagcgacaggcagtggcgtgttttagagctagaaatagcaagttaaaataaggctagtccgttatcaacttgaaaaagtggcaccgagtcggtgctttt

SEQ ID NO: 628 - RNA, 100 nt, synthetic construct
  source 1..100: mol_type = other RNA
ggataagtacacacggtttcgttttagagctagaaatagcaagttaaaataaggctagtccgttatcaacttgaaaaagtggcaccgagtcggtgctttt

SEQ ID NO: 629 - RNA, 100 nt, synthetic construct
  source 1..100: mol_type = other RNA
tcatccaggataagtacacagttttagagctagaaatagcaagttaaaataaggctagtccgttatcaacttgaaaaagtggcaccgagtcggtgctttt

SEQ ID NO: 630 - RNA, 100 nt, synthetic construct
  source 1..100: mol_type = other RNA
gggcactggtggcatcatccgttttagagctagaaatagcaagttaaaataaggctagtccgttatcaacttgaaaaagtggcaccgagtcggtgctttt

SEQ ID NO: 631 - RNA, 100 nt, synthetic construct
  source 1..100: mol_type = other RNA
gtttgcatccagggcactgggttttagagctagaaatagcaagttaaaataaggctagtccgttatcaacttgaaaaagtggcaccgagtcggtgctttt

SEQ ID NO: 632 - RNA, 100 nt, synthetic construct
  source 1..100: mol_type = other RNA
catcacccagcacctcagccgttttagagctagaaatagcaagttaaaataaggctagtccgttatcaacttgaaaaagtggcaccgagtcggtgctttt

SEQ ID NO: 633 - RNA, 100 nt, synthetic construct
  source 1..100: mol_type = other RNA
cacccagcacctcagcctgggttttagagctagaaatagcaagttaaaataaggctagtccgttatcaacttgaaaaagtggcaccgagtcggtgctttt

SEQ ID NO: 634 - RNA, 99 nt, synthetic construct
  source 1..99: mol_type = other RNA
ggtggacgcggctttactggttttagagctagaaatagcaagttaaaataaggctagtccgttatcaacttgaaaaagtggcaccgagtcggtgctttt

SEQ ID NO: 635 - RNA, 100 nt, synthetic construct
  source 1..100: mol_type = other RNA
tgcgggacagaaacaacgtcgttttagagctagaaatagcaagttaaaataaggctagtccgttatcaacttgaaaaagtggcaccgagtcggtgctttt

SEQ ID NO: 636 - RNA, 100 nt, synthetic construct
  source 1..100: mol_type = other RNA
ggacccgcgggtctcgtacagttttagagctagaaatagcaagttaaaataaggctagtccgttatcaacttgaaaaagtggcaccgagtcggtgctttt

SEQ ID NO: 637 - RNA, 100 nt, synthetic construct
  source 1..100: mol_type = other RNA
catccaggatgaggacccgcgttttagagctagaaatagcaagttaaaataaggctagtccgttatcaacttgaaaaagtggcaccgagtcggtgctttt

SEQ ID NO: 638 - RNA, 100 nt, synthetic construct
  source 1..100: mol_type = other RNA
tcatccaggatgaggacccggttttagagctagaaatagcaagttaaaataaggctagtccgttatcaacttgaaaaagtggcaccgagtcggtgctttt

SEQ ID NO: 639 - RNA, 100 nt, synthetic construct
  source 1..100: mol_type = other RNA
gcgggtcctcatcctggatggttttagagctagaaatagcaagttaaaataaggctagtccgttatcaacttgaaaaagtggcaccgagtcggtgctttt

SEQ ID NO: 640 - RNA, 100 nt, synthetic construct
  source 1..100: mol_type = other RNA
gggcactagtagcctcatccgttttagagctagaaatagcaagttaaaataaggctagtccgttatcaacttgaaaaagtggcaccgagtcggtgctttt

SEQ ID NO: 641 - RNA, 100 nt, synthetic construct
  source 1..100: mol_type = other RNA
cctagatgtgcagtgcgagcgttttagagctagaaatagcaagttaaaataaggctagtccgttatcaacttgaaaaagtggcaccgagtcggtgctttt

SEQ ID NO: 642 - RNA, 100 nt, synthetic construct
  source 1..100: mol_type = other RNA
actcacgctggatagcctccgttttagagctagaaatagcaagttaaaataaggctagtccgttatcaacttgaaaaagtggcaccgagtcggtgctttt

SEQ ID NO: 643 - RNA, 100 nt, synthetic construct
  source 1..100: mol_type = other RNA
cacagcccaagatagttaaggttttagagctagaaatagcaagttaaaataaggctagtccgttatcaacttgaaaaagtggcaccgagtcggtgctttt

SEQ ID NO: 644 - RNA, 100 nt, synthetic construct
  source 1..100: mol_type = other RNA
acagcccaagatagttaagtgttttagagctagaaatagcaagttaaaataaggctagtccgttatcaacttgaaaaagtggcaccgagtcggtgctttt

SEQ ID NO: 645 - RNA, 100 nt, synthetic construct
  source 1..100: mol_type = other RNA
cagcccaagatagttaagtggttttagagctagaaatagcaagttaaaataaggctagtccgttatcaacttgaaaaagtggcaccgagtcggtgctttt

SEQ ID NO: 646 - RNA, 100 nt, synthetic construct
  source 1..100: mol_type = other RNA
ttaccccacttaactatcttgttttagagctagaaatagcaagttaaaataaggctagtccgttatcaacttgaaaaagtggcaccgagtcggtgctttt

SEQ ID NO: 647 - RNA, 100 nt, synthetic construct
  source 1..100: mol_type = other RNA
cttaccccacttaactatctgttttagagctagaaatagcaagttaaaataaggctagtccgttatcaacttgaaaaagtggcaccgagtcggtgctttt

SEQ ID NO: 648 - RNA, 100 nt, synthetic construct
  source 1..100: mol_type = other RNA
tcgatctatgaaaaagacaggttttagagctagaaatagcaagttaaaataaggctagtccgttatcaacttgaaaaagtggcaccgagtcggtgctttt

SEQ ID NO: 649 - RNA, 99 nt, synthetic construct
  source 1..99: mol_type = other RNA
ctcacgctggatagcctccgttttagagctagaaatagcaagttaaaataaggctagtccgttatcaacttgaaaaagtggcaccgagtcggtgctttt

SEQ ID NO: 650 - RNA, 98 nt, synthetic construct
  source 1..98: mol_type = other RNA
tcacgctggatagcctccgttttagagctagaaatagcaagttaaaataaggctagtccgttatcaacttgaaaaagtggcaccgagtcggtgctttt

SEQ ID NO: 651 - RNA, 100 nt, synthetic construct
  source 1..100: mol_type = other RNA
cgcgagcacagctaaggccagttttagagctagaaatagcaagttaaaataaggctagtccgttatcaacttgaaaaagtggcaccgagtcggtgctttt

SEQ ID NO: 652 - RNA, 100 nt, synthetic construct
  source 1..100: mol_type = other RNA
gagtagcgcgagcacagctagttttagagctagaaatagcaagttaaaataaggctagtccgttatcaacttgaaaaagtggcaccgagtcggtgctttt

SEQ ID NO: 653 - RNA, 100 nt, synthetic construct
  source 1..100: mol_type = other RNA
gctactctctctttctggccgttttagagctagaaatagcaagttaaaataaggctagtccgttatcaacttgaaaaagtggcaccgagtcggtgctttt

SEQ ID NO: 654 - RNA, 100 nt, synthetic construct
  source 1..100: mol_type = other RNA
cgtgagtaaacctgaatcttgttttagagctagaaatagcaagttaaaataaggctagtccgttatcaacttgaaaaagtggcaccgagtcggtgctttt

SEQ ID NO: 655 - RNA, 100 nt, synthetic construct
  source 1..100: mol_type = other RNA
tttgactttccattctctgcgttttagagctagaaatagcaagttaaaataaggctagtccgttatcaacttgaaaaagtggcaccgagtcggtgctttt

SEQ ID NO: 656 - RNA, 100 nt, synthetic construct
  source 1..100: mol_type = other RNA
acccagacacatagcaattcgttttagagctagaaatagcaagttaaaataaggctagtccgttatcaacttgaaaaagtggcaccgagtcggtgctttt

SEQ ID NO: 657 - RNA, 100 nt, synthetic construct
  source 1..100: mol_type = other RNA
aagtcaacttcaatgtcggagttttagagctagaaatagcaagttaaaataaggctagtccgttatcaacttgaaaaagtggcaccgagtcggtgctttt

SEQ ID NO: 658 - RNA, 100 nt, synthetic construct
  source 1..100: mol_type = other RNA
cagtaagtcaacttcaatgtgttttagagctagaaatagcaagttaaaataaggctagtccgttatcaacttgaaaaagtggcaccgagtcggtgctttt

SEQ ID NO: 659 - RNA, 100 nt, synthetic construct
  source 1..100: mol_type = other RNA
gaagttgacttactgaagaagttttagagctagaaatagcaagttaaaataaggctagtccgttatcaacttgaaaaagtggcaccgagtcggtgctttt

SEQ ID NO: 660 - RNA, 100 nt, synthetic construct
  source 1..100: mol_type = other RNA
tggagagagaattgaaaaaggttttagagctagaaatagcaagttaaaataaggctagtccgttatcaacttgaaaaagtggcaccgagtcggtgctttt

SEQ ID NO: 661 - RNA, 100 nt, synthetic construct
  source 1..100: mol_type = other RNA
ttcagacttgtctttcagcagttttagagctagaaatagcaagttaaaataaggctagtccgttatcaacttgaaaaagtggcaccgagtcggtgctttt

SEQ ID NO: 662 - RNA, 100 nt, synthetic construct
  source 1..100: mol_type = other RNA
acttgtctttcagcaaggacgttttagagctagaaatagcaagttaaaataaggctagtccgttatcaacttgaaaaagtggcaccgagtcggtgctttt

SEQ ID NO: 663 - RNA, 100 nt, synthetic construct
  source 1..100: mol_type = other RNA
atactcatctttttcagtgggttttagagctagaaatagcaagttaaaataaggctagtccgttatcaacttgaaaaagtggcaccgagtcggtgctttt

SEQ ID NO: 664 - RNA, 100 nt, synthetic construct
  source 1..100: mol_type = other RNA
catactcatctttttcagtggttttagagctagaaatagcaagttaaaataaggctagtccgttatcaacttgaaaaagtggcaccgagtcggtgctttt

SEQ ID NO: 665 - RNA, 100 nt, synthetic construct
  source 1..100: mol_type = other RNA
gcatactcatctttttcagtgttttagagctagaaatagcaagttaaaataaggctagtccgttatcaacttgaaaaagtggcaccgagtcggtgctttt

SEQ ID NO: 666 - RNA, 100 nt, synthetic construct
  source 1..100: mol_type = other RNA
ggcatactcatctttttcaggttttagagctagaaatagcaagttaaaataaggctagtccgttatcaacttgaaaaagtggcaccgagtcggtgctttt

SEQ ID NO: 667 - RNA, 100 nt, synthetic construct
  source 1..100: mol_type = other RNA
agtcacatggttcacacggcgttttagagctagaaatagcaagttaaaataaggctagtccgttatcaacttgaaaaagtggcaccgagtcggtgctttt

SEQ ID NO: 668 - RNA, 100 nt, synthetic construct
  source 1..100: mol_type = other RNA
acaaagtcacatggttcacagttttagagctagaaatagcaagttaaaataaggctagtccgttatcaacttgaaaaagtggcaccgagtcggtgctttt

SEQ ID NO: 669 - RNA, 100 nt, synthetic construct
  source 1..100: mol_type = other RNA
tgggctgtgacaaagtcacagttttagagctagaaatagcaagttaaaataaggctagtccgttatcaacttgaaaaagtggcaccgagtcggtgctttt

SEQ ID NO: 670 - protein, 1837 aa, synthetic construct
MSSETGPVAVDPTLRRRIEPHEFEVFFDPRELRKETCLLYEINWGGRHSIWRHTSQNTNKHVEVNFIEKFTTERYFCPNTRCSITWFLSWSPCGECSRAITEFLSRYPHVTLFIYIARLYHHADPRNRQGLRDLISSGVTIQIMTEQESGYCWRNFVNYSPSNEAHWPRYPHLWVRLYVLELYCIILGLPPCLNILRRKQPQLTFFTIALQSCHYQRLPPHILWATGLKSGGSSGGSSGSETPGTSESATPESSGGSSGGSDKKYSIGLAIGTNSVGWAVITDEYKVPSKKFKVLGNTDRHSIKKNLIGALLFDSGETAEATRLKRTARRRYTRRKNRICYLQEIFSNEMAKVDDSFFHRLEESFLVEEDKKHERHPIFGNIVDEVAYHEKYPTIYHLRKKLVDSTDKADLRLIYLALAHMIKFRGHFLIEGDLNPDNSDVDKLFIQLVQTYNQLFEENPINASGVDAKAILSARLSKSRRLENLIAQLPGEKKNGLFGNLIALSLGLTPNFKSNFDLAEDAKLQLSKDTYDDDLDNLLAQIGDQYADLFLAAKNLSDAILLSDILRVNTEITKAPLSASMIKRYDEHHQDLTLLKALVRQQLPEKYKEIFFDQSKNGYAGYIDGGASQEEFYKFIKPILEKMDGTEELLVKLNREDLLRKQRTFDNGSIPHQIHLGELHAILRRQEDFYPFLKDNREKIEKILTFRIPYYVGPLARGNSRFAWMTRKSEETITPWNFEEVVDKGASAQSFIERMTNFDKNLPNEKVLPKHSLLYEYFTVYNELTKVKYVTEGMRKPAFLSGEQKKAIVDLLFKTNRKVTVKQLKEDYFKKIECFDSVEISGVEDRFNASLGTYHDLLKIIKDKDFLDNEENEDILEDIVLTLTLFEDREMIEERLKTYAHLFDDKVMKQLKRRRYTGWGRLSRKLINGIRDKQSGKTILDFLKSDGFANRNFMQLIHDDSLTFKEDIQKAQVSGQGDSLHEHIANLAGSPAIKKGILQTVKVVDELVKVMGRHKPENIVIEMARENQTTQKGQKNSRERMKRIEEGIKELGSQILKEHPVENTQLQNEKLYLYYLQNGRDMYVDQELDINRLSDYDVDHIVPQSFLKDDSIDNKVLTRSDKNRGKSDNVPSEEVVKKMKNYWRQLLNAKLITQRKFDNLTKAERGGLSELDKAGFIKRQLVETRQITKHVAQILDSRMNTKYDENDKLIREVKVITLKSKLVSDFRKDFQFYKVREINNYHHAHDAYLNAVVGTALIKKYPKLESEFVYGDYKVYDVRKMIAKSEQEIGKATAKYFFYSNIMNFFKTEITLANGEIRKRPLIETNGETGEIVWDKGRDFATVRKVLSMPQVNIVKKTEVQTGGFSKESILPKRNSDKLIARKKDWDPKKYGGFDSPTVAYSVLVVAKVEKGKSKKLKSVKELLGITIMERSSFEKNPIDFLEAKGYKEVKKDLIIKLPKYSLFELENGRKRMLASAGELQKGNELALPSKYVNFLYLASHYEKLKGSPEDNEQKQLFVEQHKHYLDEIIEQISEFSKRVILADANLDKVLSAYNKHRDKPIREQAENIIHLFTLTNLGAPAAFKYFDTTIDRKRYTSTKEVLDATLIHQSITGLYETRIDLSQLGGDSGGSGGSGGSTNLSDIIEKETGKQLVIQESILMLPEEVEEVIGNKPESDILVHTAYDESTDENVMLLTSDAPEYKPWALVIQDSNGENKIKMLSGGSGGSGGSTNLSDIIEKETGKQLVIQESILMLPEEVEEVIGNKPESDILVHTAYDESTDENVMLLTSDAPEYKPWALVIQDSNGENKIKMLSGGSKRTADGSEFESPKKKRKVE

SEQ ID NO: 671 - DNA, 20 bp, synthetic construct
  source 1..20: mol_type = other DNA
ttcgtatctgtaaaaccaag

SEQ ID NO: 672 - RNA, 20 nt, synthetic construct
  source 1..20: mol_type = other RNA
gcaaccatggctcgtcgggc

SEQ ID NO: 673 - RNA, 20 nt, synthetic construct
  source 1..20: mol_type = other RNA
actcaccaaagcagtgcagc

SEQ ID NO: 674 - RNA, 20 nt, synthetic construct
  source 1..20: mol_type = other RNA
ctcaccgctgcttgggatac

SEQ ID NO: 675 - RNA, 100 nt, synthetic construct
  source 1..100: mol_type = other RNA
gcaaccatggctcgtcgggcgttttagagctagaaatagcaagttaaaataaggctagtccgttatcaacttgaaaaagtggcaccgagtcggtgctttt

SEQ ID NO: 676 - RNA, 100 nt, synthetic construct
  source 1..100: mol_type = other RNA
actcaccaaagcagtgcagcgttttagagctagaaatagcaagttaaaataaggctagtccgttatcaacttgaaaaagtggcaccgagtcggtgctttt

SEQ ID NO: 677 - RNA, 100 nt, synthetic construct
  source 1..100: mol_type = other RNA
ctcaccgctgcttgggatacgttttagagctagaaatagcaagttaaaataaggctagtccgttatcaacttgaaaaagtggcaccgagtcggtgctttt

SEQ ID NO: 678 - RNA, 20 nt, synthetic construct
  source 1..20: mol_type = other RNA
aagcatgtgctccagaggtt

SEQ ID NO: 679 - RNA, 20 nt, synthetic construct
  source 1..20: mol_type = other RNA
gaagcatgtgctccagaggt

SEQ ID NO: 680 - RNA, 20 nt, synthetic construct
  source 1..20: mol_type = other RNA
ttcttacccagggtacaggg

SEQ ID NO: 681 - RNA, 20 nt, synthetic construct
  source 1..20: mol_type = other RNA
ttcttacccagggtacaggg

SEQ ID NO: 682 - RNA, 20 nt, synthetic construct
  source 1..20: mol_type = other RNA
cgaccagaagattgtagaat

SEQ ID NO: 683 - RNA, 20 nt, synthetic construct
  source 1..20: mol_type = other RNA
tcgaccagaagattgtagaa

SEQ ID NO: 684 - RNA, 20 nt, synthetic construct
  source 1..20: mol_type = other RNA
aatcccattctacaatcttc

SEQ ID NO: 685 - RNA, 20 nt, synthetic construct
  source 1..20: mol_type = other RNA
tgcaatccattctactccaa

SEQ ID NO: 686 - RNA, 20 nt, synthetic construct
  source 1..20: mol_type = other RNA
ggtccatgaggagccagccc

SEQ ID NO: 687 - RNA, 20 nt, synthetic construct
  source 1..20: mol_type = other RNA
tgcagggttcaccagccagc

SEQ ID NO: 688 - RNA, 20 nt, synthetic construct
  source 1..20: mol_type = other RNA
cgaaaactgcgaggagacca

SEQ ID NO: 689 - RNA, 20 nt, synthetic construct
  source 1..20: mol_type = other RNA
aggctgcaagattgtggcaa

SEQ ID NO: 690 - RNA, 20 nt, synthetic construct
  source 1..20: mol_type = other RNA
tgccagagctccagacctgc

SEQ ID NO: 691 - RNA, 20 nt, synthetic construct
  source 1..20: mol_type = other RNA
atactcactccacttcctcc

SEQ ID NO: 692 - RNA, 20 nt, synthetic construct
  source 1..20: mol_type = other RNA
atactcactccacttcctcc

SEQ ID NO: 693 - RNA, 20 nt, synthetic construct
  source 1..20: mol_type = other RNA
aggctgtggagagcaggaga

SEQ ID NO: 694 - RNA, 20 nt, synthetic construct
  source 1..20: mol_type = other RNA
tccacagcctcagtaacaac

SEQ ID NO: 695 - RNA, 20 nt, synthetic construct
  source 1..20: mol_type = other RNA
gcaggctgtgaagacaaaag

SEQ ID NO: 696 - RNA, 20 nt, synthetic construct
  source 1..20: mol_type = other RNA
caggctgtgaagacaaaaga

SEQ ID NO: 697 - RNA, 20 nt, synthetic construct
  source 1..20: mol_type = other RNA
gccctggagggacatcacca

SEQ ID NO: 698 - RNA, 20 nt, synthetic construct
  source 1..20: mol_type = other RNA
ctgggcaggctgacacattg

SEQ ID NO: 699 - RNA, 20 nt, synthetic construct
  source 1..20: mol_type = other RNA
atctccagcctcagtgagaa

SEQ ID NO: 700 - RNA, 20 nt, synthetic construct
  source 1..20: mol_type = other RNA
actgaggctggagatcacag

SEQ ID NO: 701 - RNA, 20 nt, synthetic construct
  source 1..20: mol_type = other RNA
acgctcacctgatgtccaag

SEQ ID NO: 702 - RNA, 20 nt, synthetic construct
  source 1..20: mol_type = other RNA
acgctcacctgatgtccaag

SEQ ID NO: 703 - RNA, 20 nt, synthetic construct
  source 1..20: mol_type = other RNA
cctagggatatgtgggccac

SEQ ID NO: 704 - RNA, 20 nt, synthetic construct
  source 1..20: mol_type = other RNA
ctgaggctgcaaaggggcaa

SEQ ID NO: 705 - RNA, 20 nt, synthetic construct
  source 1..20: mol_type = other RNA
gacaatctgtgaaacaaagc

SEQ ID NO: 706 - RNA, 20 nt, synthetic construct
  source 1..20: mol_type = other RNA
ccttttcaggctgagccaga

SEQ ID NO: 707 - RNA, 20 nt, synthetic construct
  source 1..20: mol_type = other RNA
cttttcaggctgagccagac

SEQ ID NO: 708 - RNA, 20 nt, synthetic construct
  source 1..20: mol_type = other RNA
gacctggatcagacaggacc

SEQ ID NO: 709 - RNA, 20 nt, synthetic construct
  source 1..20: mol_type = other RNA
caacttactccacctggctg

SEQ ID NO: 710 - RNA, 20 nt, synthetic construct
  source 1..20: mol_type = other RNA
caacttactccacctggctg

SEQ ID NO: 711 - RNA, 20 nt, synthetic construct
  source 1..20: mol_type = other RNA
cttacttcactgaggcctcc

SEQ ID NO: 712 - RNA, 20 nt, synthetic construct
  source 1..20: mol_type = other RNA
cttacttcactgaggcctcc

SEQ ID NO: 713 - RNA, 20 nt, synthetic construct
  source 1..20: mol_type = other RNA
gctcacccaaagccacagcg

SEQ ID NO: 714 - RNA, 20 nt, synthetic construct
  source 1..20: mol_type = other RNA
gctcacccaaagccacagcg

SEQ ID NO: 715 - RNA, 20 nt, synthetic construct
  source 1..20: mol_type = other RNA
gctcttacctgctacctcca

SEQ ID NO: 716 - RNA, 20 nt, synthetic construct
  source 1..20: mol_type = other RNA
gctcttacctgctacctcca

SEQ ID NO: 717 - RNA, 20 nt, synthetic construct
  source 1..20: mol_type = other RNA
aaagacctggcaggcagaag

SEQ ID NO: 718 - RNA, 20 nt, synthetic construct
  source 1..20: mol_type = other RNA
gaaccaacactcgatcaccg

SEQ ID NO: 719 - RNA, 20 nt, synthetic construct
  source 1..20: mol_type = other RNA
gctggcccatttcgcagagg

SEQ ID NO: 720 - RNA, 20 nt, synthetic construct
  source 1..20: mol_type = other RNA
ctggcccatttcgcagaggc

SEQ ID NO: 721 - RNA, 20 nt, synthetic construct
  source 1..20: mol_type = other RNA
accacagccagagcctcagc

SEQ ID NO: 722 - RNA, 20 nt, synthetic construct
  source 1..20: mol_type = other RNA
actgggacaagatgctctgc

SEQ ID NO: 723 - RNA, 20 nt, synthetic construct
  source 1..20: mol_type = other RNA
cgtcgccactctagcccaaa

SEQ ID NO: 724 - RNA, 20 nt, synthetic construct
  source 1..20: mol_type = other RNA
gcgacgccagcacctgggta

SEQ ID NO: 725 - RNA, 20 nt, synthetic construct
  source 1..20: mol_type = other RNA
cgacgccagcacctgggtaa

SEQ ID NO: 726 - RNA, 20 nt, synthetic construct
  source 1..20: mol_type = other RNA
atcccaagcagcaaatgcca

SEQ ID NO: 727 - RNA, 20 nt, synthetic construct
  source 1..20: mol_type = other RNA
acagttcaaccctttcagga

SEQ ID NO: 728 - RNA, 20 nt, synthetic construct
  source 1..20: mol_type = other RNA
ctttcaggagggcacctatc

SEQ ID NO: 729 - RNA, 20 nt, synthetic construct
  source 1..20: mol_type = other RNA
cctgcaaggacaggtcaccc

SEQ ID NO: 730 - RNA, 20 nt, synthetic construct
  source 1..20: mol_type = other RNA
cgagagccacctctgcccct

SEQ ID NO: 731 - RNA, 20 nt, synthetic construct
  source 1..20: mol_type = other RNA
aactggcatggcccgagcca

SEQ ID NO: 732 - RNA, 20 nt, synthetic construct
  source 1..20: mol_type = other RNA
cactcaccggttcctggggg

SEQ ID NO: 733 - RNA, 20 nt, synthetic construct
  source 1..20: mol_type = other RNA
cactcaccggttcctggggg

SEQ ID NO: 734 - RNA, 20 nt, synthetic construct
  source 1..20: mol_type = other RNA
cgcaggggacgtcgtcgtgc

SEQ ID NO: 735 - RNA, 20 nt, synthetic construct
  source 1..20: mol_type = other RNA
cacactcacagtacacggtg

SEQ ID NO: 736 - RNA, 20 nt, synthetic construct
  source 1..20: mol_type = other RNA
cacactcacagtacacggtg

SEQ ID NO: 737 - RNA, 20 nt, synthetic construct
  source 1..20: mol_type = other RNA
tggtcctgggagagacagaa

SEQ ID NO: 738 - RNA, 20 nt, synthetic construct
  source 1..20: mol_type = other RNA
ttcctcacctttgacctgga

SEQ ID NO: 739 - RNA, 20 nt, synthetic construct
  source 1..20: mol_type = other RNA
ttcctcacctttgacctgga

SEQ ID NO: 740 - RNA, 20 nt, synthetic construct
  source 1..20: mol_type = other RNA
cctacaggtgcccaacatgg

SEQ ID NO: 741 - RNA, 20 nt, synthetic construct
  source 1..20: mol_type = other RNA
tgtcacagctgacttgggcg

SEQ ID NO: 742 - RNA, 20 nt, synthetic construct
  source 1..20: mol_type = other RNA
aacgcagggccccagctatt

SEQ ID NO: 743 - RNA, 20 nt, synthetic construct
  source 1..20: mol_type = other RNA
cccgcagggcagcaggagcg

SEQ ID NO: 744 - RNA, 20 nt, synthetic construct
  source 1..20: mol_type = other RNA
gagtgccaggtgatttgggc

SEQ ID NO: 745 - RNA, 20 nt, synthetic construct
  source 1..20: mol_type = other RNA
cggggccatggggctgggcc

SEQ ID NO: 746 - RNA, 20 nt, synthetic construct
  source 1..20: mol_type = other RNA
tcaccagcagcagctcccgg

SEQ ID NO: 747 - RNA, 20 nt, synthetic construct
  source 1..20: mol_type = other RNA
tcaccagcagcagctcccgg

SEQ ID NO: 748 - RNA, 20 nt, synthetic construct
  source 1..20: mol_type = other RNA
cactcaccagcagcagctcc

SEQ ID NO: 749 - RNA, 20 nt, synthetic construct
  source 1..20: mol_type = other RNA
cactcaccagcagcagctcc

SEQ ID NO: 750 - RNA, 20 nt, synthetic construct
  source 1..20: mol_type = other RNA
ggcaggcttgcattccctcc

SEQ ID NO: 751 - RNA, 20 nt, synthetic construct
  source 1..20: mol_type = other RNA
ggcaggcttgcattccctcc

SEQ ID NO: 752 - RNA, 20 nt, synthetic construct
  source 1..20: mol_type = other RNA
cgtcggtacctgttctcctc

SEQ ID NO: 753 - RNA, 20 nt, synthetic construct
  source 1..20: mol_type = other RNA
cgtcggtacctgttctcctc

SEQ ID NO: 754 - RNA, 20 nt, synthetic construct
  source 1..20: mol_type = other RNA
ttcttctccagtgcccccca

SEQ ID NO: 755 - RNA, 20 nt, synthetic construct
  source 1..20: mol_type = other RNA
taggctcaccagagggcaca

SEQ ID NO: 756 - RNA, 20 nt, synthetic construct
  source 1..20: mol_type = other RNA
taggctcaccagagggcaca

SEQ ID NO: 757 - RNA, 20 nt, synthetic construct
  source 1..20: mol_type = other RNA
ctgtccattcctcagtctcc

SEQ ID NO: 758 - RNA, 20 nt, synthetic construct
  source 1..20: mol_type = other RNA
tgtcccatgtcttatttccc

SEQ ID NO: 759 - RNA, 20 nt, synthetic construct
  source 1..20: mol_type = other RNA
cccgccttctaaatctcccc

SEQ ID NO: 760 - RNA, 20 nt, synthetic construct
  source 1..20: mol_type = other RNA
ggaattttctcttccaagcg

SEQ ID NO: 761 - RNA, 20 nt, synthetic construct
  source 1..20: mol_type = other RNA
aagagaaaattccagtgggc

SEQ ID NO: 762 - RNA, 20 nt, synthetic construct
  source 1..20: mol_type = other RNA
ggagagggcggggccacgct

SEQ ID NO: 763 - RNA, 20 nt, synthetic construct
  source 1..20: mol_type = other RNA
ccgccctctccgctcgtgat

SEQ ID NO: 764 - RNA, 20 nt, synthetic construct
  source 1..20: mol_type = other RNA
agggccaatcacgagcggag

SEQ ID NO: 765 - RNA, 20 nt, synthetic construct
  source 1..20: mol_type = other RNA
tcgtgattggccctaagttc

SEQ ID NO: 766 - RNA, 20 nt, synthetic construct
  source 1..20: mol_type = other RNA
aggggccatggggctgggcc

SEQ ID NO: 767 - RNA, 20 nt, synthetic construct
  source 1..20: mol_type = other RNA
actcaccagcggcggctgcc

SEQ ID NO: 768 - RNA, 20 nt, synthetic construct
  source 1..20: mol_type = other RNA
actcaccagcggcggctgcc

SEQ ID NO: 769 - RNA, 20 nt, synthetic construct
  source 1..20: mol_type = other RNA
ctcaccagcggcggctgccg

SEQ ID NO: 770 - RNA, 20 nt, synthetic construct
  source 1..20: mol_type = other RNA
ctcaccagcggcggctgccg

SEQ ID NO: 771 - RNA, 20 nt, synthetic construct
  source 1..20: mol_type = other RNA
cactcaccagcggcggctgc

SEQ ID NO: 772 - RNA, 20 nt, synthetic construct
  source 1..20: mol_type = other RNA
cactcaccagcggcggctgc

SEQ ID NO: 773 - RNA, 20 nt, synthetic construct
  source 1..20: mol_type = other RNA
ctacagcgatatctgaaatc

SEQ ID NO: 774 - RNA, 20 nt, synthetic construct
  source 1..20: mol_type = other RNA
gtcggtacctgttctcctga

SEQ ID NO: 775 - RNA, 20 nt, synthetic construct
  source 1..20: mol_type = other RNA
gtcggtacctgttctcctga

SEQ ID NO: 776 - RNA, 20 nt, synthetic construct
  source 1..20: mol_type = other RNA
caggctcaccagagggcaca

SEQ ID NO: 777 - RNA, 20 nt, synthetic construct
  source 1..20: mol_type = other RNA
caggctcaccagagggcaca

SEQ ID NO: 778 - RNA, 20 nt, synthetic construct
  source 1..20: mol_type = other RNA
gaggcgcatggcggcgaggt

SEQ ID NO: 779 - RNA, 20 nt, synthetic construct
  source 1..20: mol_type = other RNA
gaggcgcatggcggcgaggt

SEQ ID NO: 780 - RNA, 20 nt, synthetic construct
  source 1..20: mol_type = other RNA
cgcatggcggcgaggtgggg

SEQ ID NO: 781 - RNA, 20 nt, synthetic construct
  source 1..20: mol_type = other RNA
cgcatggcggcgaggtgggg

SEQ ID NO: 782 - RNA, 20 nt, synthetic construct
  source 1..20: mol_type = other RNA
aggcgcatggcggcgaggtg

SEQ ID NO: 783 - RNA, 20 nt, synthetic construct
  source 1..20: mol_type = other RNA
aggcgcatggcggcgaggtg

SEQ ID NO: 784 - RNA, 20 nt, synthetic construct
  source 1..20: mol_type = other RNA
ttcccacagggtaatgatgg

SEQ ID NO: 785 - RNA, 20 nt, synthetic construct
  source 1..20: mol_type = other RNA
acgcctacaattggaaaaca

SEQ ID NO: 786 - RNA, 20 nt, synthetic construct
  source 1..20: mol_type = other RNA
cgcctacaattggaaaacaa

SEQ ID NO: 787 - RNA, 20 nt, synthetic construct
  source 1..20: mol_type = other RNA
caattgtaggcgtgatggga

SEQ ID NO: 788 - RNA, 20 nt, synthetic construct
  source 1..20: mol_type = other RNA
tgctgagctgttaataaaac

SEQ ID NO: 789 - RNA, 20 nt, synthetic construct
  source 1..20: mol_type = other RNA
acttaccctctgacttcata

SEQ ID NO: 790 - RNA, 20 nt, synthetic construct
  source 1..20: mol_type = other RNA
acttaccctctgacttcata

SEQ ID NO: 791 - RNA, 20 nt, synthetic construct
  source 1..20: mol_type = other RNA
tcacttacttcatatttctt

SEQ ID NO: 792 - RNA, 20 nt, synthetic construct
  source 1..20: mol_type = other RNA
tcacttacttcatatttctt

SEQ ID NO: 793 - RNA, 22 nt, synthetic construct
  source 1..22: mol_type = other RNA
cattctttacgggccgcctcac

SEQ ID NO: 794 - RNA, 22 nt, synthetic construct
  source 1..22: mol_type = other RNA
tttacgggccgcctcactgact

SEQ ID NO: 795 - RNA, 22 nt, synthetic construct
  source 1..22: mol_type = other RNA
tacaagatggctcagccgatac

SEQ ID NO: 796 - RNA, 22 nt, synthetic construct
  source 1..22: mol_type = other RNA
tcaccatagccaggtctggggg

SEQ ID NO: 797 - RNA, 22 nt, synthetic construct
  source 1..22: mol_type = other RNA
tctgagtgagaatctgagctta

SEQ ID NO: 798 - RNA, 22 nt, synthetic construct
  source 1..22: mol_type = other RNA
tcactcagagaatcactcaggg

SEQ ID NO: 799 - RNA, 22 nt, synthetic construct
  source 1..22: mol_type = other RNA
ctgtggtacctggtgcgaggcc

SEQ ID NO: 800 - RNA, 22 nt, synthetic construct
  source 1..22: mol_type = other RNA
tcccaccttcttgggcagaagg

SEQ ID NO: 801 - RNA, 22 nt, synthetic construct
  source 1..22: mol_type = other RNA
ccgcacctgcacttccagcaac

SEQ ID NO: 802 - RNA, 22 nt, synthetic construct
  source 1..22: mol_type = other RNA
aggctctgtcggccatgcctac

SEQ ID NO: 803 - RNA, 22 nt, synthetic construct
  source 1..22: mol_type = other RNA
gtggggacactgctgctcccgc

SEQ ID NO: 804 - RNA, 22 nt, synthetic construct
  source 1..22: mol_type = other RNA
atccctcactattctggtcgtg

SEQ ID NO: 805 - RNA, 22 nt, synthetic construct
  source 1..22: mol_type = other RNA
tggtcgtgtgattgacatcctg

SEQ ID NO: 806 - RNA, 22 nt, synthetic construct
  source 1..22: mol_type = other RNA
tgacccccatgcctttgccagt

SEQ ID NO: 807 - RNA, 22 nt, synthetic construct
  source 1..22: mol_type = other RNA
gagacatggtgtaggtgaagca

SEQ ID NO: 808 - RNA, 22 nt, synthetic construct
  source 1..22: mol_type = other RNA
aaaggaagccagttactcatca

SEQ ID NO: 809 - RNA, 22 nt, synthetic construct
  source 1..22: mol_type = other RNA
tgaagggcatgtgcagcagaga

SEQ ID NO: 810 - RNA, 22 nt, synthetic construct
  source 1..22: mol_type = other RNA
ttcaagggcctctttatagcga

SEQ ID NO: 811 - RNA, 22 nt, synthetic construct
  source 1..22: mol_type = other RNA
ggctgtcggtccatgtaggaga

SEQ ID NO: 812 - RNA, 22 nt, synthetic construct
  source 1..22: mol_type = other RNA
cacaaccccctgcagagtggtg

SEQ ID NO: 813 - RNA, 20 nt, synthetic construct
  source 1..20: mol_type = other RNA
tgacggccatcctcggcgtc

SEQ ID NO: 814 - RNA, 20 nt, synthetic construct
  source 1..20: mol_type = other RNA
gacggccatcctcggcgtct

SEQ ID NO: 815 - RNA, 20 nt, synthetic construct
  source 1..20: mol_type = other RNA
acggccatcctcggcgtctg

SEQ ID NO: 816 - RNA, 20 nt, synthetic construct
  source 1..20: mol_type = other RNA
cgcactcacccgcccaggtc

SEQ ID NO: 817 - RNA, 20 nt, synthetic construct
  source 1..20: mol_type = other RNA
gcactcacccgcccaggtct

SEQ ID NO: 818 - RNA, 19 nt, synthetic construct
  source 1..19: mol_type = other RNA
cccaggctcgcactccatg

SEQ ID NO: 819 - RNA, 20 nt, synthetic construct
  source 1..20: mol_type = other RNA
gtcactcaccggcctcgctc

SEQ ID NO: 820 - RNA, 20 nt, synthetic construct
  source 1..20: mol_type = other RNA
ccttaccccatctcagggtg

SEQ ID NO: 821 - RNA, 20 nt, synthetic construct
  source 1..20: mol_type = other RNA
cttaccccatctcagggtga

SEQ ID NO: 822 - RNA, 20 nt, synthetic construct
  source 1..20: mol_type = other RNA
ggctctgggaaaagagggga

SEQ ID NO: 823 - RNA, 20 nt, synthetic construct
  source 1..20: mol_type = other RNA
cttcccacagatagaaaagg

SEQ ID NO: 824 - RNA, 20 nt, synthetic construct
  source 1..20: mol_type = other RNA
ttcccacagatagaaaagga

SEQ ID NO: 825 - RNA, 20 nt, synthetic construct
  source 1..20: mol_type = other RNA
cccaggcagtgacagtgccc

SEQ ID NO: 826 - RNA, 20 nt, synthetic construct
  source 1..20: mol_type = other RNA
ccaggcagtgacagtgccca

SEQ ID NO: 827 - RNA, 20 nt, synthetic construct
  source 1..20: mol_type = other RNA
gacccgcatctcggcgtctg

SEQ ID NO: 828 - RNA, 20 nt, synthetic construct
  source 1..20: mol_type = other RNA
gcactcaccggcccaggtct

SEQ ID NO: 829 - RNA, 20 nt, synthetic construct
  source 1..20: mol_type = other RNA
tgggagcctgggggcgagga

SEQ ID NO: 830 - RNA, 20 nt, synthetic construct
  source 1..20: mol_type = other RNA
gggagcctgggggcgaggag

SEQ ID NO: 831 - RNA, 20 nt, synthetic construct
  source 1..20: mol_type = other RNA
ccccaggctcccactccatg

SEQ ID NO: 832 - RNA, 20 nt, synthetic construct
  source 1..20: mol_type = other RNA
ttaccccatctcagggtgag

SEQ ID NO: 833 - RNA, 20 nt, synthetic construct
  source 1..20: mol_type = other RNA
ttcccacaggtggaaaagga

SEQ ID NO: 834 - RNA, 20 nt, synthetic construct
  source 1..20: mol_type = other RNA
tgacccgcatctcggcgtct

SEQ ID NO: 835 - RNA, 20 nt, synthetic construct
  source 1..20: mol_type = other RNA
gcactcacaggcccaggtct

SEQ ID NO: 836 - RNA, 20 nt, synthetic construct
  source 1..20: mol_type = other RNA
cacaggcccaggtctcggtc

SEQ ID NO: 837 - RNA, 20 nt, synthetic construct
  source 1..20: mol_type = other RNA
agaccctggccccgcccccg

SEQ ID NO: 838 - RNA, 20 nt, synthetic construct
  source 1..20: mol_type = other RNA
ggctctgggaaaggagggga

SEQ ID NO: 839 - RNA, 20 nt, synthetic construct
  source 1..20: mol_type = other RNA
cccagccagcaacagtgccc

SEQ ID NO: 840 - RNA, 22 nt, synthetic construct
  source 1..22: mol_type = other RNA
ggaccgggagacacagaagtac

SEQ ID NO: 841 - RNA, 22 nt, synthetic construct
  source 1..22: mol_type = other RNA
catcgccctgaacgaggacctg

SEQ ID NO: 842 - RNA, 22 nt, synthetic construct
  source 1..22: mol_type = other RNA
catcgccctgaacgaggatctg

SEQ ID NO: 843 - RNA, 22 nt, synthetic construct
  source 1..22: mol_type = other RNA
ttgctggcctggctgtcctagc

SEQ ID NO: 844 - RNA, 22 nt, synthetic construct
  source 1..22: mol_type = other RNA
catcgccctgaacgaggacctg

SEQ ID NO: 845 - RNA, 100 nt, synthetic construct
  source 1..100: mol_type = other RNA
aagcatgtgctccagaggttgttttagagctagaaatagcaagttaaaataaggctagtccgttatcaacttgaaaaagtggcaccgagtcggtgctttt

SEQ ID NO: 846 - RNA, 100 nt, synthetic construct
  source 1..100: mol_type = other RNA
gaagcatgtgctccagaggtgttttagagctagaaatagcaagttaaaataaggctagtccgttatcaacttgaaaaagtggcaccgagtcggtgctttt

SEQ ID NO: 847 - RNA, 100 nt, synthetic construct
  source 1..100: mol_type = other RNA
ttcttacccagggtacaggggttttagagctagaaatagcaagttaaaataaggctagtccgttatcaacttgaaaaagtggcaccgagtcggtgctttt

SEQ ID NO: 848 - RNA, 100 nt, synthetic construct; identical to SEQ ID NO: 847
  source 1..100: mol_type = other RNA

SEQ ID NO: 849 - RNA, 100 nt, synthetic construct
  source 1..100: mol_type = other RNA
cgaccagaagattgtagaatgttttagagctagaaatagcaagttaaaataaggctagtccgttatcaacttgaaaaagtggcaccgagtcggtgctttt

SEQ ID NO: 850 - RNA, 100 nt, synthetic construct
  source 1..100: mol_type = other RNA
tcgaccagaagattgtagaagttttagagctagaaatagcaagttaaaataaggctagtccgttatcaacttgaaaaagtggcaccgagtcggtgctttt

SEQ ID NO: 851 - RNA, 100 nt, synthetic construct
  source 1..100: mol_type = other RNA
aatcccattctacaatcttcgttttagagctagaaatagcaagttaaaataaggctagtccgttatcaacttgaaaaagtggcaccgagtcggtgctttt

SEQ ID NO: 852 - RNA, 100 nt, synthetic construct
  source 1..100: mol_type = other RNA
tgcaatccattctactccaagttttagagctagaaatagcaagttaaaataaggctagtccgttatcaacttgaaaaagtggcaccgagtcggtgctttt

SEQ ID NO: 853 - RNA, 100 nt, synthetic construct
  source 1..100: mol_type = other RNA
ggtccatgaggagccagcccgttttagagctagaaatagcaagttaaaataaggctagtccgttatcaacttgaaaaagtggcaccgagtcggtgctttt

SEQ ID NO: 854 - RNA, 100 nt, synthetic construct
  source 1..100: mol_type = other RNA
tgcagggttcaccagccagcgttttagagctagaaatagcaagttaaaataaggctagtccgttatcaacttgaaaaagtggcaccgagtcggtgctttt

SEQ ID NO: 855 - RNA, 100 nt, synthetic construct
  source 1..100: mol_type = other RNA
cgaaaactgcgaggagaccagttttagagctagaaatagcaagttaaaataaggctagtccgttatcaacttgaaaaagtggcaccgagtcggtgctttt

SEQ ID NO: 856 - RNA, 100 nt, synthetic construct
  source 1..100: mol_type = other RNA
aggctgcaagattgtggcaagttttagagctagaaatagcaagttaaaataaggctagtccgttatcaacttgaaaaagtggcaccgagtcggtgctttt

SEQ ID NO: 857 - RNA, 100 nt, synthetic construct
  source 1..100: mol_type = other RNA
tgccagagctccagacctgcgttttagagctagaaatagcaagttaaaataaggctagtccgttatcaacttgaaaaagtggcaccgagtcggtgctttt

SEQ ID NO: 858 - RNA, 100 nt, synthetic construct
  source 1..100: mol_type = other RNA
atactcactccacttcctccgttttagagctagaaatagcaagttaaaataaggctagtccgttatcaacttgaaaaagtggcaccgagtcggtgctttt

SEQ ID NO: 859 - RNA, 100 nt, synthetic construct; identical to SEQ ID NO: 858
  source 1..100: mol_type = other RNA

SEQ ID NO: 860 - RNA, 100 nt, synthetic construct
  source 1..100: mol_type = other RNA
aggctgtggagagcaggagagttttagagctagaaatagcaagttaaaataaggctagtccgttatcaacttgaaaaagtggcaccgagtcggtgctttt

SEQ ID NO: 861 - RNA, 100 nt, synthetic construct
  source 1..100: mol_type = other RNA
tccacagcctcagtaacaacgttttagagctagaaatagcaagttaaaataaggctagtccgttatcaacttgaaaaagtggcaccgagtcggtgctttt

SEQ ID NO: 862 - RNA, 100 nt, synthetic construct
  source 1..100: mol_type = other RNA
gcaggctgtgaagacaaaaggttttagagctagaaatagcaagttaaaataaggctagtccgttatcaacttgaaaaagtggcaccgagtcggtgctttt

SEQ ID NO: 863 - RNA, 100 nt, synthetic construct
  source 1..100: mol_type = other RNA
caggctgtgaagacaaaagagttttagagctagaaatagcaagttaaaataaggctagtccgttatcaacttgaaaaagtggcaccgagtcggtgctttt

SEQ ID NO: 864 - RNA, 100 nt, synthetic construct
  source 1..100: mol_type = other RNA
gccctggagggacatcaccagttttagagctagaaatagcaagttaaaataaggctagtccgttatcaacttgaaaaagtggcaccgagtcggtgctttt

SEQ ID NO: 865 - RNA, 100 nt, synthetic construct
  source 1..100: mol_type = other RNA
ctgggcaggctgacacattggttttagagctagaaatagcaagttaaaataaggctagtccgttatcaacttgaaaaagtggcaccgagtcggtgctttt

SEQ ID NO: 866 - RNA, 100 nt, synthetic construct
  source 1..100: mol_type = other RNA
atctccagcctcagtgagaagttttagagctagaaatagcaagttaaaataaggctagtccgttatcaacttgaaaaagtggcaccgagtcggtgctttt

SEQ ID NO: 867 - RNA, 100 nt, synthetic construct
  source 1..100: mol_type = other RNA
actgaggctggagatcacaggttttagagctagaaatagcaagttaaaataaggctagtccgttatcaacttgaaaaagtggcaccgagtcggtgctttt

SEQ ID NO: 868 - RNA, 100 nt, synthetic construct
  source 1..100: mol_type = other RNA
acgctcacctgatgtccaaggttttagagctagaaatagcaagttaaaataaggctagtccgttatcaacttgaaaaagtggcaccgagtcggtgctttt

SEQ ID NO: 869 - RNA, 100 nt, synthetic construct; identical to SEQ ID NO: 868
  source 1..100: mol_type = other RNA

SEQ ID NO: 870 - RNA, 100 nt, synthetic construct
  source 1..100: mol_type = other RNA
cctagggatatgtgggccacgttttagagctagaaatagcaagttaaaataaggctagtccgttatcaacttgaaaaagtggcaccgagtcggtgctttt

SEQ ID NO: 871 - RNA, 100 nt, synthetic construct
  source 1..100: mol_type = other RNA
ctgaggctgcaaaggggcaagttttagagctagaaatagcaagttaaaataaggctagtccgttatcaacttgaaaaagtggcaccgagtcggtgctttt

SEQ ID NO: 872 - RNA, 100 nt, synthetic construct
  source 1..100: mol_type = other RNA
gacaatctgtgaaacaaagcgttttagagctagaaatagcaagttaaaataaggctagtccgttatcaacttgaaaaagtggcaccgagtcggtgctttt

SEQ ID NO: 873 - RNA, 100 nt, synthetic construct
  source 1..100: mol_type = other RNA
ccttttcaggctgagccagagttttagagctagaaatagcaagttaaaataaggctagtccgttatcaacttgaaaaagtggcaccgagtcggtgctttt

SEQ ID NO: 874 - RNA, 100 nt, synthetic construct
  source 1..100: mol_type = other RNA
cttttcaggctgagccagacgttttagagctagaaatagcaagttaaaataaggctagtccgttatcaacttgaaaaagtggcaccgagtcggtgctttt

SEQ ID NO: 875 - RNA, 100 nt, synthetic construct
  source 1..100: mol_type = other RNA
gacctggatcagacaggaccgttttagagctagaaatagcaagttaaaataaggctagtccgttatcaacttgaaaaagtggcaccgagtcggtgctttt

SEQ ID NO: 876 - RNA, 100 nt, synthetic construct
  source 1..100: mol_type = other RNA
caacttactccacctggctggttttagagctagaaatagcaagttaaaataaggctagtccgttatcaacttgaaaaagtggcaccgagtcggtgctttt

SEQ ID NO: 877 - RNA, 100 nt, synthetic construct; identical to SEQ ID NO: 876
  source 1..100: mol_type = other RNA

SEQ ID NO: 878 - RNA, 100 nt, synthetic construct
  source 1..100: mol_type = other RNA
cttacttcactgaggcctccgttttagagctagaaatagcaagttaaaataaggctagtccgttatcaacttgaaaaagtggcaccgagtcggtgctttt

SEQ ID NO: 879 - RNA, 100 nt, synthetic construct; identical to SEQ ID NO: 878
  source 1..100: mol_type = other RNA

SEQ ID NO: 880 - RNA, 100 nt, synthetic construct
  source 1..100: mol_type = other RNA
gctcacccaaagccacagcggttttagagctagaaatagcaagttaaaataaggctagtccgttatcaacttgaaaaagtggcaccgagtcggtgctttt

SEQ ID NO: 881 - RNA, 100 nt, synthetic construct; identical to SEQ ID NO: 880
  source 1..100: mol_type = other RNA

SEQ ID NO: 882 - RNA, 100 nt, synthetic construct
  source 1..100: mol_type = other RNA
gctcttacctgctacctccagttttagagctagaaatagcaagttaaaataaggctagtccgttatcaacttgaaaaagtggcaccgagtcggtgctttt

SEQ ID NO: 883 - RNA, 100 nt, synthetic construct; identical to SEQ ID NO: 882
  source 1..100: mol_type = other RNA

SEQ ID NO: 884 - RNA, 100 nt, synthetic construct
  source 1..100: mol_type = other RNA
aaagacctggcaggcagaaggttttagagctagaaatagcaagttaaaataaggctagtccgttatcaacttgaaaaagtggcaccgagtcggtgctttt

SEQ ID NO: 885 - RNA, 100 nt, synthetic construct
  source 1..100: mol_type = other RNA
gaaccaacactcgatcaccggttttagagctagaaatagcaagttaaaataaggctagtccgttatcaacttgaaaaagtggcaccgagtcggtgctttt

SEQ ID NO: 886 - RNA, 100 nt, synthetic construct
  source 1..100: mol_type = other RNA
gctggcccatttcgcagagggttttagagctagaaatagcaagttaaaataaggctagtccgttatcaacttgaaaaagtggcaccgagtcggtgctttt

SEQ ID NO: 887 - RNA, 100 nt, synthetic construct
  source 1..100: mol_type = other RNA
ctggcccatttcgcagaggcgttttagagctagaaatagcaagttaaaataaggctagtccgttatcaacttgaaaaagtggcaccgagtcggtgctttt

SEQ ID NO: 888 - RNA, 100 nt, synthetic construct
  source 1..100: mol_type = other RNA
accacagccagagcctcagcgttttagagctagaaatagcaagttaaaataaggctagtccgttatcaacttgaaaaagtggcaccgagtcggtgctttt

SEQ ID NO: 889 - RNA, 100 nt, synthetic construct
  source 1..100: mol_type = other RNA
actgggacaagatgctctgcgttttagagctagaaatagcaagttaaaataaggctagtccgttatcaacttgaaaaagtggcaccgagtcggtgctttt

SEQ ID NO: 890 - RNA, 100 nt, synthetic construct
  source 1..100: mol_type = other RNA
cgtcgccactctagcccaaagttttagagctagaaatagcaagttaaaataaggctagtccgttatcaacttgaaaaagtggcaccgagtcggtgctttt

SEQ ID NO: 891 - RNA, 100 nt, synthetic construct
  source 1..100: mol_type = other RNA
gcgacgccagcacctgggtagttttagagctagaaatagcaagttaaaataaggctagtccgttatcaacttgaaaaagtggcaccgagtcggtgctttt

SEQ ID NO: 892 - RNA, 100 nt, synthetic construct
  source 1..100: mol_type = other RNA
cgacgccagcacctgggtaagttttagagctagaaatagcaagttaaaataaggctagtccgttatcaacttgaaaaagtggcaccgagtcggtgctttt

SEQ ID NO: 893 - RNA, 100 nt, synthetic construct
  source 1..100: mol_type = other RNA
atcccaagcagcaaatgccagttttagagctagaaatagcaagttaaaataaggctagtccgttatcaacttgaaaaagtggcaccgagtcggtgctttt

SEQ ID NO: 894 - RNA, 100 nt, synthetic construct
  source 1..100: mol_type = other RNA
acagttcaaccctttcaggagttttagagctagaaatagcaagttaaaataaggctagtccgttatcaacttgaaaaagtggcaccgagtcggtgctttt

SEQ ID NO: 895 - RNA, 100 nt, synthetic construct
  source 1..100: mol_type = other RNA
ctttcaggagggcacctatcgttttagagctagaaatagcaagttaaaataaggctagtccgttatcaacttgaaaaagtggcaccgagtcggtgctttt

SEQ ID NO: 896 - RNA, 100 nt, synthetic construct
  source 1..100: mol_type = other RNA
cctgcaaggacaggtcacccgttttagagctagaaatagcaagttaaaataaggctagtccgttatcaacttgaaaaagtggcaccgagtcggtgctttt

SEQ ID NO: 897 - RNA, 100 nt, synthetic construct
  source 1..100: mol_type = other RNA
cgagagccacctctgcccctgttttagagctagaaatagcaagttaaaataaggctagtccgttatcaacttgaaaaagtggcaccgagtcggtgctttt

SEQ ID NO: 898 - RNA, 100 nt, synthetic construct
  source 1..100: mol_type = other RNA
aactggcatggcccgagccagttttagagctagaaatagcaagttaaaataaggctagtccgttatcaacttgaaaaagtggcaccgagtcggtgctttt

SEQ ID NO: 899 - RNA, 100 nt, synthetic construct
  source 1..100: mol_type = other RNA
cactcaccggttcctggggggttttagagctagaaatagcaagttaaaataaggctagtccgttatcaacttgaaaaagtggcaccgagtcggtgctttt

SEQ ID NO: 900 - RNA, 100 nt, synthetic construct; identical to SEQ ID NO: 899
  source 1..100: mol_type = other RNA

SEQ ID NO: 901 - RNA, 100 nt, synthetic construct
  source 1..100: mol_type = other RNA
cgcaggggacgtcgtcgtgcgttttagagctagaaatagcaagttaaaataaggctagtccgttatcaacttgaaaaagtggcaccgagtcggtgctttt

SEQ ID NO: 902 - RNA, 100 nt, synthetic construct
  source 1..100: mol_type = other RNA
cacactcacagtacacggtggttttagagctagaaatagcaagttaaaataaggctagtccgttatcaacttgaaaaagtggcaccgagtcggtgctttt

SEQ ID NO: 903 - RNA, 100 nt, synthetic construct; identical to SEQ ID NO: 902
  source 1..100: mol_type = other RNA

SEQ ID NO: 904 - RNA, 100 nt, synthetic construct
  source 1..100: mol_type = other RNA
tggtcctgggagagacagaagttttagagctagaaatagcaagttaaaataaggctagtccgttatcaacttgaaaaagtggcaccgagtcggtgctttt

SEQ ID NO: 905 - RNA, 100 nt, synthetic construct
  source 1..100: mol_type = other RNA
ttcctcacctttgacctggagttttagagctagaaatagcaagttaaaataaggctagtccgttatcaacttgaaaaagtggcaccgagtcggtgctttt

SEQ ID NO: 906 - RNA, 100 nt, synthetic construct; identical to SEQ ID NO: 905
  source 1..100: mol_type = other RNA

SEQ ID NO: 907 - RNA, 100 nt, synthetic construct
  source 1..100: mol_type = other RNA
cctacaggtgcccaacatgggttttagagctagaaatagcaagttaaaataaggctagtccgttatcaacttgaaaaagtggcaccgagtcggtgctttt

SEQ ID NO: 908 - RNA, 100 nt, synthetic construct
  source 1..100: mol_type = other RNA
tgtcacagctgacttgggcggttttagagctagaaatagcaagttaaaataaggctagtccgttatcaacttgaaaaagtggcaccgagtcggtgctttt

SEQ ID NO: 909 - RNA, 100 nt, synthetic construct
  source 1..100: mol_type = other RNA
aacgcagggccccagctattgttttagagctagaaatagcaagttaaaataaggctagtccgttatcaacttgaaaaagtggcaccgagtcggtgctttt

SEQ ID NO: 910 - RNA, 100 nt, synthetic construct
  source 1..100: mol_type = other RNA
cccgcagggcagcaggagcggttttagagctagaaatagcaagttaaaataaggctagtccgttatcaacttgaaaaagtggcaccgagtcggtgctttt

SEQ ID NO: 911 - RNA, 100 nt, synthetic construct
  source 1..100: mol_type = other RNA
gagtgccaggtgatttgggcgttttagagctagaaatagcaagttaaaataaggctagtccgttatcaacttgaaaaagtggcaccgagtcggtgctttt

SEQ ID NO: 912 - RNA, 100 nt, synthetic construct
  source 1..100: mol_type = other RNA
cggggccatggggctgggccgttttagagctagaaatagcaagttaaaataaggctagtccgttatcaacttgaaaaagtggcaccgagtcggtgctttt

SEQ ID NO: 913 - RNA, 100 nt, synthetic construct
  source 1..100: mol_type = other RNA
tcaccagcagcagctcccgggttttagagctagaaatagcaagttaaaataaggctagtccgttatcaacttgaaaaagtggcaccgagtcggtgctttt

SEQ ID NO: 914 - RNA, 100 nt, synthetic construct; identical to SEQ ID NO: 913
  source 1..100: mol_type = other RNA

SEQ ID NO: 915 - RNA, 100 nt, synthetic construct
  source 1..100: mol_type = other RNA
cactcaccagcagcagctccgttttagagctagaaatagcaagttaaaataaggctagtccgttatcaacttgaaaaagtggcaccgagtcggtgctttt

SEQ ID NO: 916 - RNA, 100 nt, synthetic construct; identical to SEQ ID NO: 915
  source 1..100: mol_type = other RNA

SEQ ID NO: 917 - RNA, 100 nt, synthetic construct
  source 1..100: mol_type = other RNA
ggcaggcttgcattccctccgttttagagctagaaatagcaagttaaaataaggctagtccgttatcaacttgaaaaagtggcaccgagtcggtgctttt

SEQ ID NO: 918 - RNA, 100 nt, synthetic construct; identical to SEQ ID NO: 917
  source 1..100: mol_type = other RNA

SEQ ID NO: 919 - RNA, 100 nt, synthetic construct
  source 1..100: mol_type = other RNA
cgtcggtacctgttctcctcgttttagagctagaaatagcaagttaaaataaggctagtccgttatcaacttgaaaaagtggcaccgagtcggtgctttt

SEQ ID NO: 920 - RNA, 100 nt, synthetic construct; identical to SEQ ID NO: 919
  source 1..100: mol_type = other RNA

SEQ ID NO: 921 - RNA, 100 nt, synthetic construct
  source 1..100: mol_type = other RNA
ttcttctccagtgccccccagttttagagctagaaatagcaagttaaaataaggctagtccgttatcaacttgaaaaagtggcaccgagtcggtgctttt

SEQ ID NO: 922 - RNA, 100 nt, synthetic construct
  source 1..100: mol_type = other RNA
taggctcaccagagggcacagttttagagctagaaatagcaagttaaaataaggctagtccgttatcaacttgaaaaagtggcaccgagtcggtgctttt

SEQ ID NO: 923 - RNA, 100 nt, synthetic construct; identical to SEQ ID NO: 922
  source 1..100: mol_type = other RNA

SEQ ID NO: 924 - RNA, 100 nt, synthetic construct
  source 1..100: mol_type = other RNA
ctgtccattcctcagtctccgttttagagctagaaatagcaagttaaaataaggctagtccgttatcaacttgaaaaagtggcaccgagtcggtgctttt

SEQ ID NO: 925 - RNA, 100 nt, synthetic construct
  source 1..100: mol_type = other RNA
tgtcccatgtcttatttcccgttttagagctagaaatagcaagttaaaataaggctagtccgttatcaacttgaaaaagtggcaccgagtcggtgctttt

SEQ ID NO: 926 - RNA, 100 nt, synthetic construct
  source 1..100: mol_type = other RNA
cccgccttctaaatctccccgttttagagctagaaatagcaagttaaaataaggctagtccgttatcaacttgaaaaagtggcaccgagtcggtgctttt

SEQ ID NO: 927 - RNA, 100 nt, synthetic construct
  source 1..100: mol_type = other RNA
ggaattttctcttccaagcggttttagagctagaaatagcaagttaaaataaggctagtccgttatcaacttgaaaaagtggcaccgagtcggtgctttt

SEQ ID NO: 928 - RNA, 100 nt, synthetic construct
  source 1..100: mol_type = other RNA
aagagaaaattccagtgggcgttttagagctagaaatagcaagttaaaataaggctagtccgttatcaacttgaaaaagtggcaccgagtcggtgctttt

SEQ ID NO: 929 - RNA, 100 nt, synthetic construct
  source 1..100: mol_type = other RNA
ggagagggcggggccacgctgttttagagctagaaatagcaagttaaaataaggctagtccgttatcaacttgaaaaagtggcaccgagtcggtgctttt

SEQ ID NO: 930 - RNA, 100 nt, synthetic construct
  source 1..100: mol_type = other RNA
ccgccctctccgctcgtgatgttttagagctagaaatagcaagttaaaataaggctagtccgttatcaacttgaaaaagtggcaccgagtcggtgctttt

SEQ ID NO: 931 - RNA, 100 nt, synthetic construct
  source 1..100: mol_type = other RNA
agggccaatcacgagcggaggttttagagctagaaatagcaagttaaaataaggctagtccgttatcaacttgaaaaagtggcaccgagtcggtgctttt

SEQ ID NO: 932 - RNA, 100 nt, synthetic construct
  source 1..100: mol_type = other RNA
tcgtgattggccctaagttcgttttagagctagaaatagcaagttaaaataaggctagtccgttatcaacttgaaaaagtggcaccgagtcggtgctttt

SEQ ID NO: 933 - RNA, 100 nt, synthetic construct
  source 1..100: mol_type = other RNA
aggggccatggggctgggccgttttagagctagaaatagcaagttaaaataaggctagtccgttatcaacttgaaaaagtggcaccgagtcggtgctttt

SEQ ID NO: 934 - RNA, 100 nt, synthetic construct
  source 1..100: mol_type = other RNA
actcaccagcggcggctgccgttttagagctagaaatagcaagttaaaataaggctagtccgttatcaacttgaaaaagtggcaccgagtcggtgctttt

SEQ ID NO: 935 - RNA, 100 nt, synthetic construct; identical to SEQ ID NO: 934
  source 1..100: mol_type = other RNA

SEQ ID NO: 936 - RNA, 100 nt, synthetic construct
  source 1..100: mol_type = other RNA
ctcaccagcggcggctgccggttttagagctagaaatagcaagttaaaataaggctagtccgttatcaacttgaaaaagtggcaccgagtcggtgctttt

SEQ ID NO: 937 - RNA, 100 nt, synthetic construct; identical to SEQ ID NO: 936
  source 1..100: mol_type = other RNA

SEQ ID NO: 938 - RNA, 100 nt, synthetic construct
  source 1..100: mol_type = other RNA
cactcaccagcggcggctgcgttttagagctagaaatagcaagttaaaataaggctagtccgttatcaacttgaaaaagtggcaccgagtcggtgctttt

SEQ ID NO: 939 - RNA, 100 nt, synthetic construct; identical to SEQ ID NO: 938
  source 1..100: mol_type = other RNA

SEQ ID NO: 940 - RNA, 100 nt, synthetic construct
  source 1..100: mol_type = other RNA
ctacagcgatatctgaaatcgttttagagctagaaatagcaagttaaaataaggctagtccgttatcaacttgaaaaagtggcaccgagtcggtgctttt

SEQ ID NO: 941 - RNA, 100 nt, synthetic construct
  source 1..100: mol_type = other RNA
gtcggtacctgttctcctgagttttagagctagaaatagcaagttaaaataaggctagtccgttatcaacttgaaaaagtggcaccgagtcggtgctttt

SEQ ID NO: 942 - RNA, 100 nt, synthetic construct; identical to SEQ ID NO: 941
  source 1..100: mol_type = other RNA

SEQ ID NO: 943 - RNA, 100 nt, synthetic construct
  source 1..100: mol_type = other RNA
caggctcaccagagggcacagttttagagctagaaatagcaagttaaaataaggctagtccgttatcaacttgaaaaagtggcaccgagtcggtgctttt

SEQ ID NO: 944 - RNA, 100 nt, synthetic construct; identical to SEQ ID NO: 943
  source 1..100: mol_type = other RNA

SEQ ID NO: 945 - RNA, 100 nt, synthetic construct
  source 1..100: mol_type = other RNA
gaggcgcatggcggcgaggtgttttagagctagaaatagcaagttaaaataaggctagtccgttatcaacttgaaaaagtggcaccgagtcggtgctttt

SEQ ID NO: 946 - RNA, 100 nt, synthetic construct; identical to SEQ ID NO: 945
  source 1..100: mol_type = other RNA

SEQ ID NO: 947 - RNA, 100 nt, synthetic construct
  source 1..100: mol_type = other RNA
cgcatggcggcgaggtgggggttttagagctagaaatagcaagttaaaataaggctagtccgttatcaacttgaaaaagtggcaccgagtcggtgctttt

SEQ ID NO: 948 - RNA, 100 nt, synthetic construct; identical to SEQ ID NO: 947
  source 1..100: mol_type = other RNA

SEQ ID NO: 949 - RNA, 100 nt, synthetic construct
  source 1..100: mol_type = other RNA
aggcgcatggcggcgaggtggttttagagctagaaatagcaagttaaaataaggctagtccgttatcaacttgaaaaagtggcaccgagtcggtgctttt

SEQ ID NO: 950 - RNA, 100 nt, synthetic construct; identical to SEQ ID NO: 949
  source 1..100: mol_type = other RNA

SEQ ID NO: 951 - RNA, 100 nt, synthetic construct
  source 1..100: mol_type = other RNA
ttcccacagggtaatgatgggttttagagctagaaatagcaagttaaaataaggctagtccgttatcaacttgaaaaagtggcaccgagtcggtgctttt

SEQ ID NO: 952 - RNA, 100 nt, synthetic construct
  source 1..100: mol_type = other RNA
acgcctacaattggaaaacagttttagagctagaaatagcaagttaaaataaggctagtccgttatcaacttgaaaaagtggcaccgagtcggtgctttt

SEQ ID NO: 953 - RNA, 100 nt, synthetic construct
  source 1..100: mol_type = other RNA
cgcctacaattggaaaacaagttttagagctagaaatagcaagttaaaataaggctagtccgttatcaacttgaaaaagtggcaccgagtcggtgctttt

SEQ ID NO: 954 - RNA, 100 nt, synthetic construct
  source 1..100: mol_type = other RNA
caattgtaggcgtgatgggagttttagagctagaaatagcaagttaaaataaggctagtccgttatcaacttgaaaaagtggcaccgagtcggtgctttt

SEQ ID NO: 955 - RNA, 100 nt, synthetic construct
  source 1..100: mol_type = other RNA
tgctgagctgttaataaaacgttttagagctagaaatagcaagttaaaataaggctagtccgttatcaacttgaaaaagtggcaccgagtcggtgctttt

SEQ ID NO: 956 - RNA, 100 nt, synthetic construct
  source 1..100: mol_type = other RNA
acttaccctctgacttcatagttttagagctagaaatagcaagttaaaataaggctagtccgttatcaacttgaaaaagtggcaccgagtcggtgctttt

SEQ ID NO: 957 - RNA, 100 nt, synthetic construct; identical to SEQ ID NO: 956
  source 1..100: mol_type = other RNA

SEQ ID NO: 958 - RNA, 100 nt, synthetic construct
  source 1..100: mol_type = other RNA
tcacttacttcatatttcttgttttagagctagaaatagcaagttaaaataaggctagtccgttatcaacttgaaaaagtggcaccgagtcggtgctttt

SEQ ID NO: 959 - RNA, 100 nt, synthetic construct; identical to SEQ ID NO: 958
  source 1..100: mol_type = other RNA

SEQ ID NO: 960 - RNA, 119 nt, synthetic construct
  source 1..119: mol_type = other RNA
gttctgtcttttggtcaggacaaccgtctagctataagtgctgcagggtgtgagaaactcctattgctggacgatgtctcttacgaggcattagcaccattctttacgggccgcctcac

SEQ ID NO: 961 - RNA, 119 nt, synthetic construct
  source 1..119: mol_type = other RNA
gttctgtcttttggtcaggacaaccgtctagctataagtgctgcagggtgtgagaaactcctattgctggacgatgtctcttacgaggcattagcactttacgggccgcctcactgact

SEQ ID NO: 962 - RNA, 119 nt, synthetic construct
  source 1..119: mol_type = other RNA
gttctgtcttttggtcaggacaaccgtctagctataagtgctgcagggtgtgagaaactcctattgctggacgatgtctcttacgaggcattagcactacaagatggctcagccgatac

SEQ ID NO: 963 - RNA, 119 nt, synthetic construct
  source 1..119: mol_type = other RNA
gttctgtcttttggtcaggacaaccgtctagctataagtgctgcagggtgtgagaaactcctattgctggacgatgtctcttacgaggcattagcactcaccatagccaggtctggggg

SEQ ID NO: 964 - RNA, 119 nt, synthetic construct
  source 1..119: mol_type = other RNA
gttctgtcttttggtcaggacaaccgtctagctataagtgctgcagggtgtgagaaactcctattgctggacgatgtctcttacgaggcattagcactctgagtgagaatctgagctta

SEQ ID NO: 965 - RNA, 119 nt, synthetic construct
  source 1..119: mol_type = other RNA
gttctgtcttttggtcaggacaaccgtctagctataagtgctgcagggtgtgagaaactcctattgctggacgatgtctcttacgaggcattagcactcactcagagaatcactcaggg

SEQ ID NO: 966 - RNA, 119 nt, synthetic construct
  source 1..119: mol_type = other RNA
gttctgtcttttggtcaggacaaccgtctagctataagtgctgcagggtgtgagaaactcctattgctggacgatgtctcttacgaggcattagcacctgtggtacctggtgcgaggcc

SEQ ID NO: 967 - RNA, 119 nt, synthetic construct
  source 1..119: mol_type = other RNA
gttctgtcttttggtcaggacaaccgtctagctataagtgctgcagggtgtgagaaactcctattgctggacgatgtctcttacgaggcattagcactcccaccttcttgggcagaagg

SEQ ID NO: 968 - RNA, 119 nt, synthetic construct
  source 1..119: mol_type = other RNA
gttctgtcttttggtcaggacaaccgtctagctataagtgctgcagggtgtgagaaactcctattgctggacgatgtctcttacgaggcattagcacccgcacctgcacttccagcaac

SEQ ID NO: 969 - RNA, 119 nt, synthetic construct
  source 1..119: mol_type = other RNA
gttctgtcttttggtcaggacaaccgtctagctataagtgctgcagggtgtgagaaactcctattgctggacgatgtctcttacgaggcattagcacaggctctgtcggccatgcctac

SEQ ID NO: 970 - RNA, 119 nt, synthetic construct
  source 1..119: mol_type = other RNA
gttctgtcttttggtcaggacaaccgtctagctataagtgctgcagggtgtgagaaactcctattgctggacgatgtctcttacgaggcattagcacgtggggacactgctgctcccgc

SEQ ID NO: 971 - RNA, 119 nt, synthetic construct
  source 1..119: mol_type = other RNA
gttctgtcttttggtcaggacaaccgtctagctataagtgctgcagggtgtgagaaactcctattgctggacgatgtctcttacgaggcattagcacatccctcactattctggtcgtg

SEQ ID NO: 972 - RNA, 119 nt, synthetic construct
  source 1..119: mol_type = other RNA
gttctgtcttttggtcaggacaaccgtctagctataagtgctgcagggtgtgagaaactcctattgctggacgatgtctcttacgaggcattagcactggtcgtgtgattgacatcctg

SEQ ID NO: 973 - RNA, 119 nt, synthetic construct
  source 1..119: mol_type = other RNA
gttctgtcttttggtcaggacaaccgtctagctataagtgctgcagggtgtgagaaactcctattgctggacgatgtctcttacgaggcattagcactgacccccatgcctttgccagt

SEQ ID NO: 974 - RNA, 119 nt, synthetic construct
  source 1..119: mol_type = other RNA
gttctgtcttttggtcaggacaaccgtctagctataagtgctgcagggtgtgagaaactcctattgctggacgatgtctcttacgaggcattagcacgagacatggtgtaggtgaagca

SEQ ID NO: 975 - RNA, 119 nt, synthetic construct
  source 1..119: mol_type = other RNA
gttctgtcttttggtcaggacaaccgtctagctataagtgctgcagggtgtgagaaactcctattgctggacgatgtctcttacgaggcattagcacaaaggaagccagttactcatca

SEQ ID NO: 976 - RNA, 119 nt, synthetic construct
  source 1..119: mol_type = other RNA
gttctgtcttttggtcaggacaaccgtctagctataagtgctgcagggtgtgagaaactcctattgctggacgatgtctcttacgaggcattagcactgaagggcatgtgcagcagaga

SEQ ID NO: 977 - RNA, 119 nt, synthetic construct
  source 1..119: mol_type = other RNA
gttctgtcttttggtcaggacaaccgtctagctataagtgctgcagggtgtgagaaactcctattgctggacgatgtctcttacgaggcattagcacttcaagggcctctttatagcga

SEQ ID NO: 978 - RNA, 119 nt, synthetic construct
  source 1..119: mol_type = other RNA
gttctgtcttttggtcaggacaaccgtctagctataagtgctgcagggtgtgagaaactcctattgctggacgatgtctcttacgaggcattagcacggctgtcggtccatgtaggaga

SEQ ID NO: 979 - RNA, 119 nt, synthetic construct
  source 1..119: mol_type = other RNA
gttctgtcttttggtcaggacaaccgtctagctataagtgctgcagggtgtgagaaactcctattgctggacgatgtctcttacgaggcattagcaccacaaccccctgcagagtggtg

SEQ ID NO: 980 - RNA, 100 nt, synthetic construct
  source 1..100: mol_type = other RNA
tgacggccatcctcggcgtcgttttagagctagaaatagcaagttaaaataaggctagtccgttatcaacttgaaaaagtggcaccgagtcggtgctttt

SEQ ID NO: 981 - RNA, 100 nt, synthetic construct
  source 1..100: mol_type = other RNA
gacggccatcctcggcgtctgttttagagctagaaatagcaagttaaaataaggctagtccgttatcaacttgaaaaagtggcaccgagtcggtgctttt

SEQ ID NO: 982 - RNA, 100 nt, synthetic construct
  source 1..100: mol_type = other RNA
acggccatcctcggcgtctggttttagagctagaaatagcaagttaaaataaggctagtccgttatcaacttgaaaaagtggcaccgagtcggtgctttt

SEQ ID NO: 983 - RNA, 100 nt, synthetic construct
  source 1..100: mol_type = other RNA
cgcactcacccgcccaggtcgttttagagctagaaatagcaagttaaaataaggctagtccgttatcaacttgaaaaagtggcaccgagtcggtgctttt

SEQ ID NO: 984 - RNA, 100 nt, synthetic construct
  source 1..100: mol_type = other RNA
gcactcacccgcccaggtctgttttagagctagaaatagcaagttaaaataaggctagtccgttatcaacttgaaaaagtggcaccgagtcggtgctttt

SEQ ID NO: 985 - RNA, 99 nt, synthetic construct
  source 1..99: mol_type = other RNA
cccaggctcgcactccatggttttagagctagaaatagcaagttaaaataaggctagtccgttatcaacttgaaaaagtggcaccgagtcggtgctttt

SEQ ID NO: 986 - RNA, 100 nt, synthetic construct
  source 1..100: mol_type = other RNA
gtcactcaccggcctcgctcgttttagagctagaaatagcaagttaaaataaggctagtccgttatcaacttgaaaaagtggcaccgagtcggtgctttt

SEQ ID NO: 987 - RNA, 100 nt, synthetic construct
  source 1..100: mol_type = other RNA
ccttaccccatctcagggtggttttagagctagaaatagcaagttaaaataaggctagtccgttatcaacttgaaaaagtggcaccgagtcggtgctttt

SEQ ID NO: 988 - RNA, 100 nt, synthetic construct
  source 1..100: mol_type = other RNA
cttaccccatctcagggtgagttttagagctagaaatagcaagttaaaataaggctagtccgttatcaacttgaaaaagtggcaccgagtcggtgctttt

SEQ ID NO: 989 - RNA, 100 nt, synthetic construct
  source 1..100: mol_type = other RNA
ggctctgggaaaagaggggagttttagagctagaaatagcaagttaaaataaggctagtccgttatcaacttgaaaaagtggcaccgagtcggtgctttt

SEQ ID NO: 990 - RNA, 100 nt, synthetic construct
  source 1..100: mol_type = other RNA
cttcccacagatagaaaagggttttagagctagaaatagcaagttaaaataaggctagtccgttatcaacttgaaaaagtggcaccgagtcggtgctttt

SEQ ID NO: 991 - RNA, 100 nt, synthetic construct
  source 1..100: mol_type = other RNA
ttcccacagatagaaaaggagttttagagctagaaatagcaagttaaaataaggctagtccgttatcaacttgaaaaagtggcaccgagtcggtgctttt

SEQ ID NO: 992 - RNA, 100 nt, synthetic construct
  source 1..100: mol_type = other RNA
cccaggcagtgacagtgcccgttttagagctagaaatagcaagttaaaataaggctagtccgttatcaacttgaaaaagtggcaccgagtcggtgctttt

SEQ ID NO: 993 - RNA, 100 nt, synthetic construct
  source 1..100: mol_type = other RNA
ccaggcagtgacagtgcccagttttagagctagaaatagcaagttaaaataaggctagtccgttatcaacttgaaaaagtggcaccgagtcggtgctttt

SEQ ID NO: 994 - RNA, 100 nt, synthetic construct
  source 1..100: mol_type = other RNA
gacccgcatctcggcgtctggttttagagctagaaatagcaagttaaaataaggctagtccgttatcaacttgaaaaagtggcaccgagtcggtgctttt

SEQ ID NO: 995 - RNA, 100 nt, synthetic construct
  source 1..100: mol_type = other RNA
gcactcaccggcccaggtctgttttagagctagaaatagcaagttaaaataaggctagtccgttatcaacttgaaaaagtggcaccgagtcggtgctttt

SEQ ID NO: 996 - RNA, 100 nt, synthetic construct
  source 1..100: mol_type = other RNA
tgggagcctgggggcgaggagttttagagctagaaatagcaagttaaaataaggctagtccgttatcaacttgaaaaagtggcaccgagtcggtgctttt

SEQ ID NO: 997 - RNA, 100 nt, synthetic construct
  source 1..100: mol_type = other RNA
gggagcctgggggcgaggaggttttagagctagaaatagcaagttaaaataaggctagtccgttatcaacttgaaaaagtggcaccgagtcggtgctttt

SEQ ID NO: 998 - RNA, 100 nt, synthetic construct
  source 1..100: mol_type = other RNA
ccccaggctcccactccatggttttagagctagaaatagcaagttaaaataaggctagtccgttatcaacttgaaaaagtggcaccgagtcggtgctttt

SEQ ID NO: 999 - RNA, 100 nt, synthetic construct
  source 1..100: mol_type = other RNA
ttaccccatctcagggtgaggttttagagctagaaatagcaagttaaaataaggctagtccgttatcaacttgaaaaagtggcaccgagtcggtgctttt

SEQ ID NO: 1000 - RNA, 100 nt, synthetic construct
  source 1..100: mol_type = other RNA
ttcccacaggtggaaaaggagttttagagctagaaatagcaagttaaaataaggctagtccgttatcaacttgaaaaagtggcaccgagtcggtgctttt

SEQ ID NO: 1001 - RNA, 100 nt, synthetic construct
  source 1..100: mol_type = other RNA
tgacccgcatctcggcgtctgttttagagctagaaatagcaagttaaaataaggctagtccgttatcaacttgaaaaagtggcaccgagtcggtgctttt

SEQ ID NO: 1002 - RNA, 100 nt, synthetic construct
  source 1..100: mol_type = other RNA
gcactcacaggcccaggtctgttttagagctagaaatagcaagttaaaataaggctagtccgttatcaacttgaaaaagtggcaccgagtcggtgctttt

SEQ ID NO: 1003 - RNA, 100 nt, synthetic construct
  source 1..100: mol_type = other RNA
cacaggcccaggtctcggtcgttttagagctagaaatagcaagttaaaataaggctagtccgttatcaacttgaaaaagtggcaccgagtcggtgctttt

SEQ ID NO: 1004 - RNA, 100 nt, synthetic construct
  source 1..100: mol_type = other RNA
agaccctggccccgcccccggttttagagctagaaatagcaagttaaaataaggctagtccgttatcaacttgaaaaagtggcaccgagtcggtgctttt

SEQ ID NO: 1005 - RNA, 100 nt, synthetic construct
  source 1..100: mol_type = other RNA
ggctctgggaaaggaggggagttttagagctagaaatagcaagttaaaataaggctagtccgttatcaacttgaaaaagtggcaccgagtcggtgctttt

SEQ ID NO: 1006 - RNA, 100 nt, synthetic construct
  source 1..100: mol_type = other RNA
cccagccagcaacagtgcccgttttagagctagaaatagcaagttaaaataaggctagtccgttatcaacttgaaaaagtggcaccgagtcggtgctttt

SEQ ID NO: 1007 - RNA, 119 nt, synthetic construct
  source 1..119: mol_type = other RNA
gttctgtcttttggtcaggacaaccgtctagctataagtgctgcagggtgtgagaaactcctattgctggacgatgtctcttacgaggcattagcacggaccgggagacacagaagtac

SEQ ID NO: 1008 - RNA, 119 nt, synthetic construct
  source 1..119: mol_type = other RNA
gttctgtcttttggtcaggacaaccgtctagctataagtgctgcagggtgtgagaaactcctattgctggacgatgtctcttacgaggcattagcaccatcgccctgaacgaggacctg

SEQ ID NO: 1009 - RNA, 119 nt, synthetic construct
  source 1..119: mol_type = other RNA
gttctgtcttttggtcaggacaaccgtctagctataagtgctgcagggtgtgagaaactcctattgctggacgatgtctcttacgaggcattagcaccatcgccctgaacgaggatctg

SEQ ID NO: 1010 - RNA, 119 nt, synthetic construct
  source 1..119: mol_type = other RNA
gttctgtcttttggtcaggacaaccgtctagctataagtgctgcagggtgtgagaaactcctattgctggacgatgtctcttacgaggcattagcacttgctggcctggctgtcctagc

SEQ ID NO: 1011 - RNA, 119 nt, synthetic construct; identical to SEQ ID NO: 1008
  source 1..119: mol_type = other RNA

SEQ ID NO: 1012 - protein, 319 aa, synthetic construct
MVVMAPRTLFLLLSGALTLTETWAGSHSMRYFSAAVSRPGRGEPRFIAMGYVDDTQFVRFDSDSACPRMEPRAPWVEQEGPEYWEEETRNTKAHAQTDRMNLQTLRGYYNQSEASSHTLQWMIGCDLGSDGRLLRGYEQYAYDGKDYLALNEDLRSWTAADTAAQISKRKCEAANVAEQRRAYLEGTCVEWLHRYLENGKEMLQRADPPKTHVTHHPVFDYEATLRCWALGFYPAEIILTWQRDGEDQTQDVELVETRPAGDGTFQKWAAVVVPSGEEQRYTCHVQHEGLPEPLMLRWSKEGDGGIMSVRESRSLSEDL

SEQ ID NO: 1013 - protein, 315 aa, synthetic construct
MYRMQLLSCIALSLALVTNSGSHSMRYFSAAVSRPGRGEPRFIAMGYVDDTQFVRFDSDSACPRMEPRAPWVEQEGPEYWEEETRNTKAHAQTDRMNLQTLRGYYNQSEASSHTLQWMIGCDLGSDGRLLRGYEQYAYDGKDYLALNEDLRSWTAADTAAQISKRKCEAANVAEQRRAYLEGTCVEWLHRYLENGKEMLQRADPPKTHVTHHPVFDYEATLRCWALGFYPAEIILTWQRDGEDQTQDVELVETRPAGDGTFQKWAAVVVPSGEEQRYTCHVQHEGLPEPLMLRWSKEGDGGIMSVRESRSLSEDL

SEQ ID NO: 1014 - protein, 458 aa, synthetic construct
MYRMQLLSCIALSLALVTNSIQRTPKIQVYSRHPAENGKSNFLNCYVSGFHPSDIEVDLLKNGERIEKVEHSDLSFSKDWSFYLLYYTEFTPTEKDEYACRVNHVTLSQPKIVKWDRDMGGGGSGGGGSGGGGSRIIPRHLQLGGGGSGGGGSGGGGSGGGGSGSHSMRYFSAAVSRPGRGEPRFIAMGYVDDTQFVRFDSDSACPRMEPRAPWVEQEGPEYWEEETRNTKAHAQTDRMNLQTLRGYYNQSEASSHTLQWMIGCDLGSDGRLLRGYEQYAYDGKDYLALNEDLRSWTAADTAAQISKRKCEAANVAEQRRAYLEGTCVEWLHRYLENGKEMLQRADPPKTHVTHHPVFDYEATLRCWALGFYPAEIILTWQRDGEDQTQDVELVETRPAGDGTFQKWAAVVVPSGEEQRYTCHVQHEGLPEPLMLRWSKEGDGGIMSVRESRSLSEDL

SEQ ID NO: 1015 - protein, 458 aa, synthetic construct
MSRSVALAVLALLSLSGLEAVMAPRTLFLGGGGSGGGGSGGGGSIQRTPKIQVYSRHPAENGKSNFLNCYVSGFHPSDIEVDLLKNGERIEKVEHSDLSFSKDWSFYLLYYTEFTPTEKDEYACRVNHVTLSQPKIVKWDRDMGGGGSGGGGSGGGGSGGGGSGSHSLKYFHTSVSRPGRGEPRFISVGYVDDTQFVRFDNDAASPRMVPRAPWMEQEGSEYWDRETRSARDTAQIFRVNLRTLRGYYNQSEAGSHTLQWMHGCELGPDGRFLRGYEQFAYDGKDYLTLNEDLRSWTAVDTAAQISEQKSNDASEAEHQRAYLEDTCVEWLHKYLEKGKETLLHLEPPKTHVTHHPISDHEATLRCWALGFYPAEITLTWQQDGEGHTQDTELVETRPAGDGTFQKWAAVVVPSGEEQRYTCHVQHEGLPEPVTLRWSKEGDGGIMSVRESRSLSEDL

SEQ ID NO: 1016 - protein, 427 aa, synthetic construct
MSRSVALAVLALLSLSGLEAVMAPRTLFLGGSGGGASGGGSHSLKYFHTSVSRPGRGEPRFISVGYVDDTQFVRFDNDAASPRMVPRAPWMEQEGSEYWDRETRSARDTAQIFRVNLRTLRGYYNQSEAGSHTLQWMHGCELGPDGRFLRGYEQFAYDGKDYLTLNEDLRSWTAVDTAAQISEQKSNDASEAEHQRAYLEDTCVEWLHKYLEKGKETLLHLEPPKTHVTHHPISDHEATLRCWALGFYPAEITLTWQQDGEGHTQDTELVETRPAGDGTFQKWAAVVVPSGEEQRYTCHVQHEGLPEPVTLRWGGGGSGGGGSGGGGSIQRTPKIQVYSRHPAENGKSNFLNCYVSGFHPSDIEVDLLKNGERIEKVEHSDLSFSKDWSFYLLYYTEFTPTEKDEYACRVNHVTLSQPKIVKWDRDM

SEQ ID NO: 1017 - protein, 334 aa, synthetic construct
MSRSVALAVLALLSLSGLEAVMAPRTLFLGGSGGGASGGGSHSLKYFHTSVSRPGRGEPRFISVGYVDDTQFVRFDNDAASPRMVPRAPWMEQEGSEYWDRETRSARDTAQIFRVNLRTLRGYYNQSEAGSHTLQWMHGCELGPDGRFLRGYEQFAYDGKDYLTLNEDLRSWTAVDTAAQISEQKSNDASEAEHQRAYLEDTCVEWLHKYLEKGKETLLHLEPPKTHVTHHPISDHEATLRCWALGFYPAEITLTWQQDGEGHTQDTELVETRPAGDGTFQKWAAVVVPSGEEQRYTCHVQHEGLPEPVTLRWSKEGDGGIMSVRESRSLSEDL

SEQ ID NO: 1018 - protein, 313 aa, synthetic construct
MSRSVALAVLALLSLSGLEAVMAPRTLFLGGSGGGASGGGSHSLKYFHTSVSRPGRGEPRFISVGYVDDTQFVRFDNDAASPRMVPRAPWMEQEGSEYWDRETRSARDTAQIFRVNLRTLRGYYNQSEAGSHTLQWMHGCELGPDGRFLRGYEQFAYDGKDYLTLNEDLRSWTAVDTAAQISEQKSNDASEAEHQRAYLEDTCVEWLHKYLEKGKETLLHLEPPKTHVTHHPISDHEATLRCWALGFYPAEITLTWQQDGEGHTQDTELVETRPAGDGTFQKWAAVVVPSGEEQRYTCHVQHEGLPEPVTLRW

SEQ ID NO: 1019 - protein, 473 aa, synthetic construct
MSRSVALAVLALLSLSGLEAVMAPRTLFLGGGGSGGGGSGGGGSIQRTPKIQVYSRHPAENGKSNFLNCYVSGFHPSDIEVDLLKNGERIEKVEHSDLSFSKDWSFYLLYYTEFTPTEKDEYACRVNHVTLSQPKIVKWDRDMGGGGSGGGGSGGGGSGGGGSGSHSLKYFHTSVSRPGRGEPRFISVGYVDDTQFVRFDNDAASPRMVPRAPWMEQEGSEYWDRETRSARDTAQIFRVNLRTLRGYYNQSEAGSHTLQWMHGCELGPDGRFLRGYEQFAYDGKDYLTLNEDLRSWTAVDTAAQISEQKSNDASEAEHQRAYLEDTCVEWLHKYLEKGKETLLHLEPPKTHVTHHPISDHEATLRCWALGFYPAEITLTWQQDGEGHTQDTELVETRPAGDGTFQKWAAVVVPSGEEQRYTCHVQHEGLPEPVTLRWKPASQPTIPIMALIVLGGVAGLLLFIGLGIFFCVRC

SEQ ID NO: 1020 - protein, 417 aa, Homo sapiens
MARAMAAAWPLLLVALLVLSWPPPGTGDVVVQAPTQVPGFLGDSVTLPCYLQVPNMEVTHVSQLTWARHGESGSMAVFHQTQGPSYSESKRLEFVAARLGAELRNASLRMFGLRVEDEGNYTCLFVTFPQGSRSVDIWLRVLAKPQNTAEVQKVQLTGEPVPMARCVSTGGRPPAQITWHSDLGGMPNTSQVPGFLSGTVTVTSLWILVPSSQVDGKNVTCKVEHESFEKPQLLTVNLTVYYPPEVSISGYDNNWYLGQNEATLTCDARSNPEPTGYNWSTTMGPLPPFAVAQGAQLLIRPVDKPINTTLICNVTNALGARQAELTVQVKEGPPSEHSGISRNAIIFLVLGILVFLILLGIGIYFYWSKCSREVLWHCHLCPSSTEHASASANGHVSYSAVSRENSSSQDPQTEGTR

SEQ ID NO: 1021 - DNA, 1254 bp, Homo sapiens
  source 1..1254: mol_type = genomic DNA
atggcccgagccatggccgccgcgtggccgctgctgctggtggcgctactggtgctgtcctggccacccccaggaaccggggacgtcgtcgtgcaggcgcccacccaggtgcccggcttcttgggcgactccgtgacgctgccctgctacctacaggtgcccaacatggaggtgacgcatgtgtcacagctgacttgggcgcggcatggtgaatctggcagcatggccgtcttccaccaaacgcagggccccagctattcggagtccaaacggctggaattcgtggcagccagactgggcgcggagctgcggaatgcctcgctgaggatgttcgggttgcgcgtagaggatgaaggcaactacacctgcctgttcgtcacgttcccgcagggcagcaggagcgtggatatctggctccgagtgcttgccaagccccagaacacagctgaggttcagaaggtccagctcactggagagccagtgcccatggcccgctgcgtctccacagggggtcgcccgccagcccaaatcacctggcactcagacctgggcgggatgcccaatacgagccaggtgccagggttcctgtctggcacagtcactgtcaccagcctctggatattggtgccctcaagccaggtggacggcaagaatgtgacctgcaaggtggagcacgagagctttgagaagcctcagctgctgactgtgaacctcaccgtgtactaccccccagaggtatccatctctggctatgataacaactggtaccttggccagaatgaggccaccctgacctgcgatgctcgcagcaacccagagcccacaggctataattggagcacgaccatgggtcccctgccaccctttgctgtggcccagggcgcccagctcctgatccgtcctgtggacaaaccaatcaacacaactttaatctgcaacgtcaccaatgccctaggagctcgccaggcagaactgaccgtccaggtcaaagagggacctcccagtgagcactcaggcatatcccgtaacgccatcatcttcctggttctgggaatcctggtttttctgatcctgctggggatcgggatttatttctattggtccaaatgttcccgtgaggtcctttggcactgtcatctgtgtccctcgagtacagagcatgccagcgcctcagctaatgggcatgtctcctattcagctgtgagcagagagaacagctcttcccaggatccacagacagagggcacaaggtga

SEQ ID NO: 1022 - protein, 243 aa, Homo sapiens [sequence omitted]

SEQ ID NO: 1023 - DNA, 732 bp, Homo sapiens
  source 1..732: mol_type = genomic DNA
atgtggtccagaggttgggattcgtgtctggctctggaattgctactgctgcctctgtcactcctggtgaccagcattcaaggtcacttggtacatatgaccgtggtctccggcagcaacgtgactctgaacatctctgagagcctgcctgagaactacaaacaactaacctggttttatactttcgaccagaagattgtagaatgggattccagaaaatctaagtactttgaatccaaatttaaaggcagggtcagacttgatcctcagagtggcgcactgtacatctctaaggtccagaaagaggacaacagcacctacatcatgagggtgttgaaaaagactgggaatgagcaagaatggaagatcaagctgcaagtgcttgaccctgtacccaagcctgtcatcaaaattgagaagatagaagacatggatgacaactgttatctgaaactgtcatgtgtgatacctggcgagtctgtaaactacacctggtatggggacaaaaggcccttcccaaaggagctccagaacagtgtgcttgaaaccacccttatgccacataattactccaggtgttatacttgccaagtcagcaattctgtgagcagcaagaatggcaccgtctgcctcagtccaccctgtaccctggcccggtcctttggagtagaatggattgcaagttggctagtggtcacggtgcccaccattcttggcctgttacttacctga

SEQ ID NO: 1024 - protein, 280 aa, Homo sapiens [sequence omitted]

SEQ ID NO: 1025 - DNA, 843 bp, Homo sapiens
  source 1..843: mol_type = genomic DNA
atggccgtcatggcgccccgaaccctcgtcctgctactctcgggggctctggccctgacccagacctgggcgggctctcactccatgaggtatttcttcacatccgtgtcccggcccggccgcggggagccccgcttcatcgcagtgggctacgtggacgacacgcagttcgtgcggttcgacagcgacgccgcgagccagaggatggagccgcgggcgccgtggatagagcaggagggtccggagtattgggacggggagacacggaaagtgaaggcccactcacagactcaccgagtggacctggggaccctgcgcggctactacaaccagagcgaggccggttctcacaccgtccagaggatgtgtggctgcgacgtggggtcggactggcgcttcctccgcgggtaccaccagtacgcctacgacggcaaggattacatcgccctgaaagaggacctgcgctcttggaccgcggcggacatggcagctcagaccaccaagcacaagtgggaggcggcccatgtggcggagcagttgagagcctacctggagggcacgtgcgtggagtggctccgcagatacctggagaacgggaaggagacgctgcagcgcacggacgcccccaaaacgcatatgactcaccacgctgtctctgaccatgaagccaccctgaggtgctgggccctgagcttctaccctgcggagatcacactgacctggcagcgggatggggaggaccagacccaggacacggagctcgtggagaccaggcctgcaggggatggaaccttccagaagtgggcggctgtggtggtgccttctggacaggagcagagataa

SEQ ID NO: 1026 - protein, 362 aa, Homo sapiens [sequence omitted]

SEQ ID NO: 1027 - DNA, 1089 bp, Homo sapiens
  source 1..1089: mol_type = genomic DNA
atgcgggtcacggcaccccgaaccgtcctcctgctgctctcggcggccctggccctgaccgagacctgggccggctcccactccatgaggtatttccacaccgccatgtcccggcccggccgcggggagccccgcttcatcaccgtgggctacgtggacgacacgctgttcgtgaggttcgacagcgacgccacgagtccgaggaaggagccgcgggcgccatggatagagcaggaggggccggagtattgggaccgggagacacagatctccaagaccaacacacagacttaccgagagagcctgcggaacctgcgcggctactacaaccagagcgaggccgggtctcacacttggcagaggatgtatggctgcgacctggggcccgacgggcgcctcctccgcgggtataaccagttagcctacgacggcaaggattacatcgccctgaacgaggacctgagctcctggaccgcggcggacaccgcggctcagatcacccagcgcaagtgggaggcggcccgtgtggcggagcaggacagagcctacctggagggcctgtgcgtggagtcgctccgcagatacctggagaacgggaaggagacgctgcagcgcgcggaccccccaaagacacatgtgacccaccaccccatctctgaccatgaggccaccctgaggtgctgggccctgggcttctaccctgcggagatcacactgacctggcagcgggatggcgaggaccaaactcaggacaccgagcttgtggagaccagaccagcaggagatagaaccttccagaagtgggcagctgtggtggtgccttctggagaagagcagagatacacatgccatgtacagcatgaggggctgccgaagcccctcaccctgagatgggagccatcttcccagtccaccatccccatcgtgggcattgttgctggcctggctgtcctagcagttgtggtcatcggagctgtggtcgctactgtgatgtgtaggaggaagagctcaggtggaaaaggagggagctactctcaggctgcgtccagcgacagtgcccagggctctgatgtgtctctcacagcttga

SEQ ID NO: 1028 - protein, 366 aa, Homo sapiens [sequence omitted]

SEQ ID NO: 1029 - DNA, 1101 bp, Homo sapiens
  source 1..1101: mol_type = genomic DNA
atgcgggtcatggcgccccgaaccctcatcctgctgctctcgggagccctggccctgaccgagacctgggcctgctcccactccatgaggtatttctacaccgccgtgtcccggcccggccgcggagagccccgcttcatcgcagtgggctacgtggacgacacgcagttcgtgcggttcgacagcgacgccgcgagtccaagaggggagccgcgggcgccgtgggtggagcaggaggggccggagtattgggaccgggagacacagaagtacaagcgccaggcacaggctgaccgagtgagcctgcggaacctgcgcggctactacaaccagagcgaggccgggtctcacaccctccagaggatgtacggctgcgacctggggcccgacgggcgcctcctccgcgggtatgaccagtccgcctacgacggcaaggattacatcgccctgaacgaggacctgcgctcctggaccgctgcggacacggcggctcagatcacccagcgcaagtgggaggcggcccgtgaggcggagcagtggagagcctacctggagggcacgtgcgtggagtggctccgcagatacctggagaacgggaaggagacgctgcagcgcgcggaacacccaaagacacacgtgacccaccatcccgtctctgaccatgaggccaccctgaggtgctgggccctgggcttctaccctgcggagatcacactgacctggcagcgggatggcgaggaccaaactcaggacaccgagcttgtggagaccaggccagcaggagatggaaccttccagaagtgggcagctgtggtggtgccttctggagaagagcagagatacacgtgccatgtgcagcacgaggggctgccagagcccctcaccctgagatgggagccatcttcccagcccaccatccccatcatgggcatcgttgctggcctggctgtcctggctgtcctagctgtcctaggagctgtgatggctgttgtgatgtgtaggaggaagagctcaggtggaaaaggagggagctgctctcaggctgcgtccagcaacagtgcccagggctctgatgagtctctcatcgcttgtaaagcctga

SEQ ID NO: 1030 - protein, 383 aa, Homo sapiens
MGLGPVFLLLAGIFPFAPPGAAAEPHSLRYNLTVLSWDGSVQSGFLTEVHLDGQPFLRCDRQKCRAKPQGQWAEDVLGNKTWDRETRDLTGNGKDLRMTLAHIKDQKEGLHSLQEIRVCEIHEDNSTRSSQHFYYDGELFLSQNLETKEWTMPQSSRAQTLAMNVRNFLKEDAMKTKTHYHAMHADCLQELRRYLKSGVVLRRTVPPMVNVTRSEASEGNITVTCRASGFYPWNITLSWRQDGVSLSHDTQQWGDVLPDGNGTYQTWVATRICQGEEQRFTCYMEHSGNHSTHPVPSGKVLVLQSHWQTFHVSAVAAAAIFVIIIFYVRCCKKKTSAAEGPELVSLQVLDQHPVGTSDHRDATQLGFQPLMSDLGSTGSTEGA

SEQ ID NO: 1031 - DNA, 1152 bp, Homo sapiens
  source 1..1152: mol_type = genomic DNA
atggggctgggcccggtcttcctgcttctggctggcatcttcccttttgcacctccgggagctgctgctgagccccacagtcttcgttataacctcacggtgctgtcctgggatggatctgtgcagtcagggtttctcactgaggtacatctggatggtcagcccttcctgcgctgtgacaggcagaaatgcagggcaaagccccagggacagtgggcagaagatgtcctgggaaataagacatgggacagagagaccagagacttgacagggaacggaaaggacctcaggatgaccctggctcatatcaaggaccagaaagaaggcttgcattccctccaggagattagggtctgtgagatccatgaagacaacagcaccaggagctcccagcatttctactacgatggggagctcttcctctcccaaaacctggagactaaggaatggacaatgccccagtcctccagagctcagaccttggccatgaacgtcaggaatttcttgaaggaagatgccatgaagaccaagacacactatcacgctatgcatgcagactgcctgcaggaactacggcgatatctaaaatccggcgtagtcctgaggagaacagtgccccccatggtgaatgtcacccgcagcgaggcctcagagggcaacattaccgtgacatgcagggcttctggcttctatccctggaatatcacactgagctggcgtcaggatggggtatctttgagccacgacacccagcagtggggggatgtcctgcctgatgggaatggaacctaccagacctgggtggccaccaggatttgccaaggagaggagcagaggttcacctgctacatggaacacagcgggaatcacagcactcaccctgtgccctctgggaaagtgctggtgcttcagagtcattggcagacattccatgtttctgctgttgctgctgctgctatttttgttattattattttctatgtccgttgttgtaagaagaaaacatcagctgcagagggtccagagctcgtgagcctgcaggtcctggatcaacacccagttgggacgagtgaccacagggatgccacacagctcggatttcagcctctgatgtcagatcttgggtccactggctccactgagggcgcctag

SEQ ID NO: 1032 - protein, 383 aa, Homo sapiens
MGLGRVLLFLAVAFPFAPPAAAAEPHSLRYNLMVLSQDGSVQSGFLAEGHLDGQPFLRYDRQKRRAKPQGQWAENVLGAKTWDTETEDLTENGQDLRRTLTHIKDQKGGLHSLQEIRVCEIHEDSSTRGSRHFYYDGELFLSQNLETQESTVPQSSRAQTLAMNVTNFWKEDAMKTKTHYRAMQADCLQKLQRYLKSGVAIRRTVPPMVNVTCSEVSEGNITVTCRASSFYPRNITLTWRQDGVSLSHNTQQWGDVLPDGNGTYQTWVATRIRQGEEQRFTCYMEHSGNHGTHPVPSGKALVLQSQRTDFPYVSAAMPCFVIIIILCVPCCKKKTSAAEGPELVSLQVLDQHPVGTGDHRDAAQLGFQPLMSATGSTGSTEGT

SEQ ID NO: 1033 - DNA, 1152 bp, Homo sapiens
  source 1..1152: mol_type = genomic DNA
atggggctgggccgggtcctgctgtttctggccgtcgccttcccttttgcacccccggcagccgccgctgagccccacagtcttcgttacaacctcatggtgctgtcccaggatggatctgtgcagtcagggtttctcgctgagggacatctggatggtcagcccttcctgcgctatgacaggcagaaacgcagggcaaagccccagggacagtgggcagaaaatgtcctgggagctaagacctgggacacagagaccgaggacttgacagagaatgggcaagacctcaggaggaccctgactcatatcaaggaccagaaaggaggcttgcattccctccaggagattagggtctgtgagatccatgaagacagcagcaccaggggctcccggcatttctactacgatggggagctcttcctctcccaaaacctggagactcaagaatcgacagtgccccagtcctccagagctcagaccttggctatgaacgtcacaaatttctggaaggaagatgccatgaagaccaagacacactatcgcgctatgcaggcagactgcctgcagaaactacagcgatatctgaaatccggggtggccatcaggagaacagtgccccccatggtgaatgtcacctgcagcgaggtctcagagggcaacatcaccgtgacatgcagggcttccagcttctatccccggaatatcacactgacctggcgtcaggatggggtatctttgagccacaacacccagcagtggggggatgtcctgcctgatgggaatggaacctaccagacctgggtggccaccaggattcgccaaggagaggagcagaggttcacctgctacatggaacacagcgggaatcacggcactcaccctgtgccctctgggaaggcgctggtgcttcagagtcaacggacagactttccatatgtttctgctgctatgccatgttttgttattattattattctctgtgtcccttgttgcaagaagaaaacatcagcggcagagggtccagagcttgtgagcctgcaggtcctggatcaacacccagttgggacaggagaccacagggatgcagcacagctgggatttcagcctctgatgtcagctactgggtccactggttccactgagggcacctag

SEQ ID NO: 1034 - protein, 538 aa, Homo sapiens
MARAAALLPSRSPPTPLLWPLLLLLLLETGAQDVRVQVLPEVRGQLGGTVELPCHLLPPVPGLYISLVTWQRPDAPANHQNVAAFHPKMGPSFPSPKPGSERLSFVSAKQSTGQDTEAELQDATLALHGLTVEDEGNYTCEFATFPKGSVRGMTWLRVIAKPKNQAEAQKVTFSQDPTTVALCISKEGRPPARISWLSSLDWEAKETQVSGTLAGTVTVTSRFTLVPSGRADGVTVTCKVEHESFEEPALIPVTLSVRYPPEVSISGYDDNWYLGRTDATLSCDVRSNPEPTGYDWSTTSGTFPTSAVAQGSQLVIHAVDSLFNTTFVCTVTNAVGMGRAEQVIFVRETPNTAGAGATGGIIGGIIAAIIATAVAATGILICRQQRKEQTLQGAEEDEDLEGPPSYKPPTPKAKLEAQEMPSQLFTLGASEHSPLKTPYFDAGASCTEQEMPRYHELPTLEERSGPLHPGATSLGSPIPVPPGPPAVEDVSLDLEDEEGEEEEEYLDKINPIYDALSYSSPSDSYQGKGFVMSRAMYV

SEQ ID NO: 1035 - DNA, 1617 bp, Homo sapiens
  source 1..1617: mol_type = genomic DNA
atggcccgggccgctgccctcctgccgtcgagatcgccgccgacgccgctgctgtggccgctgctgctgctgctgctcctggaaaccggagcccaggatgtgcgagttcaagtgctacccgaggtgcgaggccagctcgggggcaccgtggagctgccgtgccacctgctgccacctgttcctggactgtacatctccctggtgacctggcagcgcccagatgcacctgcgaaccaccagaatgtggccgccttccaccctaagatgggtcccagcttccccagcccgaagcctggcagcgagcggctgtccttcgtctctgccaagcagagcactgggcaagacacagaggcagagctccaggacgccacgctggccctccacgggctcacggtggaggacgagggcaactacacttgcgagtttgccaccttccccaaggggtccgtccgagggatgacctggctcagagtcatagccaagcccaagaaccaagctgaggcccagaaggtcacgttcagccaggaccctacgacagtggccctctgcatctccaaagagggccgcccacctgcccggatctcctggctctcatccctggactgggaagccaaagagactcaggtgtcagggaccctggccggaactgtcactgtcaccagccgcttcaccttggtgccctcgggccgagcagatggtgtcacggtcacctgcaaagtggagcatgagagcttcgaggaaccagccctgatacctgtgaccctctctgtacgctaccctcctgaagtgtccatctccggctatgatgacaactggtacctcggccgtactgatgccaccctgagctgtgacgtccgcagcaacccagagcccacgggctatgactggagcacgacctcaggcaccttcccgacctccgcagtggcccagggctcccagctggtcatccacgcagtggacagtctgttcaataccaccttcgtctgcacagtcaccaatgccgtgggcatgggccgcgctgagcaggtcatctttgtccgagagacccccaacacagcaggcgcaggggccacaggcggcatcatcgggggcatcatcgccgccatcattgctactgctgtggctgccacgggcatccttatctgccggcagcagcggaaggagcagacgctgcagggggcagaggaggacgaagacctggagggacctccctcctacaagccaccgaccccaaaagcgaagctggaggcacaggagatgccctcccagctcttcactctgggggcctcggagcacagcccactcaagaccccctactttgatgctggcgcctcatgcactgagcaggaaatgcctcgataccatgagctgcccaccttggaagaacggtcaggacccttgcaccctggagccacaagcctggggtcccccatcccggtgcctccagggccacctgctgtggaagacgtttccctggatctagaggatgaggagggggaggaggaggaagagtatctggacaagatcaaccccatctatgatgctctgtcctatagcagcccctctgattcctaccagggcaaaggctttgtcatgtcccgggccatgtatgtgtga

SEQ ID NO: 1036 - protein, 1866 aa, Homo sapiens
MDPVGLQLGNKNLWSCLVRLLTKDPEWLNAKMKFFLPNTDLDSRNETLDPEQRVILQLNKLHVQGSDTWQSFIHCVCMQLEVPLDLEVLLLSTFGYDDGFTSQLGAEGKSQPESQLHHGLKRPHQSCGSSPRRKQCKKQQLELAKKYLQLLRTSAQQRYRSQIPGSGQPHAFHQVYVPPILRRATASLDTPEGAIMGDVKVEDGADVSISDLFNTRVNKGPRVTVLLGKAGMGKTTLAHRLCQKWAEGHLNCFQALFLFEFRQLNLITRFLTPSELLFDLYLSPESDHDTVFQYLEKNADQVLLIFDGLDEALQPMGPDGPGPVLTLFSHLCNGTLLPGCRVMATSRPGKLPACLPAEAAMVHMLGFDGPRVEEYVNHFFSAQPSREGALVELQTNGRLRSLCAVPALCQVACLCLHHLLPDHAPGQSVALLPNMTQLYMQMVLALSPPGHLPTSSLLDLGEVALRGLETGKVIFYAKDIAPPLIAFGATHSLLTSFCVCTGPGHQQTGYAFTHLSLQEFLAALHLMASPKVNKDTLTQYVTLHSRWVQRTKARLGLSDHLPTFLAGLASCTCRPFLSHLAQGNEDCVGAKQAAVVQVLKKLATRKLTGPKVVELCHCVDETQEPELASLTAQSLPYQLPFHNFPLTCTDLATLTNILEHREAPIHLDFDGCPLEPHCPEALVGCGQIENLSFKSRKCGDAFAEALSRSLPTMGRLQMLGLAGSKITARGISHLVKALPLCPQLKEVSFRDNQLSDQVVLNIVEVLPHLPRLRKLDLSSNSICVSTLLCLARVAVTCPTVRMLQAREADLIFLLSPPTETTAELQRAPDLQESDGQRKGAQSRSLTLRLQKCQLQVHDAEALIALLQEGPHLEEVDLSGNQLEDEGCRLMAEAASQLHIARKLDLSNNGLSVAGVHCVLRAVSACWTLAELHISLQHKTVIFMFAQEPEEQKGPQERAAFLDSLMLQMPSELPLSSRRMRLTHCGLQEKHLEQLCKALGGSCHLGHLHLDFSGNALGDEGAARLAQLLPGLGALQSLNLSENGLSLDAVLGLVRCFSTLQWLFRLDISFESQHILLRGDKTSRDMWATGSLPDFPAAAKFLGFRQRCIPRSLCLSECPLEPPSLTRLCATLKDCPGPLELQLSCEFLSDQSLETLLDCLPQLPQLSLLQLSQTGLSPKSPFLLANTLSLCPRVKKVDLRSLHHATLHFRSNEEEEGVCCGRFTGCSLSQEHVESLCWLLSKCKDLSQVDLSANLLGDSGLRCLLECLPQVPISGLLDLSHNSISQESALYLLETLPSCPRVREASVNLGSEQSFRIHFSREDQAGKTLRLSECSFRPEHVSRLATGLSKSLQLTELTLTQCCLGQKQLAILLSLVGRPAGLFSLRVQEPWADRARVLSLLEVCAQASGSVTEISISETQQQLCVQLEFPRQEENPEAVALRLAHCDLGAHHSLLVGQLMETCARLQQLSLSQVNLCEDDDASSLLLQSLLLSLSELKTFRLTSSCVSTEGLAHLASGLGHCHHLEELDLSNNQFDEEGTKALMRALEGKWMLKRLDLSHLLLNSSTLALLTHRLSQMTCLQSLRLNRNSIGDVGCCHLSEALRAATSLEELDLSHNQIGDAGVQHLATILPGLPELRKIDLSGNSISSAGGVQLAESLVLCRRLEELMLGCNALGDPTALGLAQELPQHLRVLHLPFSHLGPGGALSLAQALDGSPHLEEISLAENNLAGGVLRFCMELPLLRQIDLVSCKIDNQTAKLLTSSFTSCPALEVILLSWNLLGDEAAAELAQVLPQMGRLKRVDLEKNQITALGAWLLAEGLAQGSSIQVIRLWNNPIPCDMAQHLKSQEPRLDFAFFDNQPQAPWGT

SEQ ID NO: 1037 - DNA, 5601 bp, Homo sapiens
  source 1..5601: mol_type = genomic DNA
atggaccccgttggcctccagctcggcaacaagaacctgtggagctgtcttgtgaggctgctcaccaaagacccagaatggctgaacgccaagatgaagttcttcctccccaacacggacctggattccaggaacgagaccttggaccctgaacagagagtcatcctgcaactcaacaagctgcatgtccagggttcggacacctggcagtctttcattcattgtgtgtgcatgcagctggaggtgcctctggacctggaggtgctgctgctgagtacttttggctatgatgatgggttcaccagccagctgggagctgaggggaaaagccaacctgaatctcagctccaccatggcctgaagcgcccacatcagagctgtgggtcctcaccccgccggaagcagtgcaagaagcagcagctagagttggccaagaagtacctgcagctcctgcggacctctgcccagcagcgctacaggagccaaatccctgggtcagggcagccccacgccttccaccaggtctatgtccctccaatcctgcgccgggccacagcatccttagacactccggagggggccattatgggggacgtcaaggtggaagatggtgctgacgtgagcatctcggacctcttcaacaccagggttaacaagggcccgagggtgaccgtgcttttggggaaggctggcatgggcaagaccacgctggcccaccggctctgccagaagtgggcagagggccatctgaactgtttccaggccctgttcctttttgaattccgccagctcaacttgatcacgaggttcctgacaccgtccgagctcctttttgatctgtacctgagccctgaatcggaccacgacactgtcttccagtacctggagaagaacgctgaccaagtcctgctgatctttgatgggctagatgaggccctccagcctatgggtcctgatggcccaggcccagtcctcacccttttctcccatctctgcaatgggaccctcctgcctggctgccgggtgatggctacctcccgtccagggaagctgcctgcctgcctgcctgcagaggcagccatggtccacatgttgggctttgatgggccacgggtggaagaatatgtgaatcacttcttcagcgcccagccatcgcgggagggggccctggtggagttacagacaaatggacgtctccgaagcctgtgtgcggtgcccgcactgtgccaagtcgcctgtctctgcctccaccatctgcttcctgaccacgccccaggccagtctgtggccctcctgcccaacatgactcagctctatatgcagatggtgctcgccctcagcccccctgggcacttgcccacctcgtccctactggacctgggggaggtggccctgaggggcctggagacagggaaggttatcttctatgcaaaagatattgctccacccttgatagcttttggggccactcacagcctgctgacttccttctgcgtctgcacaggccctgggcaccagcagacaggctatgctttcacccacctcagcctgcaggagtttcttgctgccctgcacctgatggccagccccaaggtgaacaaagacacacttacccagtatgttaccctccattcccgctgggtacagcggaccaaagctagactgggcctctcagaccacctccccaccttcctggcgggcctggcatcctgcacctgccgccccttccttagccacctggcgcagggcaatgaggactgtgtgggtgccaagcaggctgctgtagtgcaggtgttgaagaagttggccacccgcaagctcacagggccaaaggttgtagagctgtgtcactgtgtggatgagacacaggagcctgagctggccagtctcaccgcacaaagcctcccctatcaactgcccttccacaatttcccactgacctgcaccgacctggccaccctgaccaacatcctagagcacagggaggcccccatccacctggattttgatggctgtcccctggagccccactgccctgaggctctggtaggctgtgggcagatagagaatctcagctttaagagcaggaagtgtggggatgcctttgcagaagccctctccaggagcttgccgacaatggggaggctgcagatgctggggttagcaggaagtaaaatcactgcccgaggcatcagccacctggtgaaagctttgcctctctgtccacagctgaaagaagtcagttttcgggacaaccagctcagtgaccaggtggtgctgaacattgtggaggttctccctcacctaccacggctccggaagcttgacctgagcagcaacagcatctgcgtgtcaaccctactctgcttggcaagggtggcagtcacgtgtcctaccgtcaggatgcttcaggccagggaggcggacctcatcttccttctttccccgcccacagagacaactgcagagctacaaagagctccagacctgcaggaaagtgacggccagaggaaaggggctcagagcagaagcttgacgctcaggctgcagaagtgtcagctccaggtccacgatgcggaggccctcatagccctgctccaggaaggccctcacctggaggaagtggacctctcagggaaccagctggaagatgaaggctgtcggctgatggcagaggctgcatcccagctgcacatcgccaggaagctggacctcagtaacaacgggctttctgtggccggggtgcattgtgtgctgagggccgtgagtgcgtgctggaccctggcagagctgcacatcagcctgcagcacaaaactgtgatcttcatgtttgcccaggagccagaggagcagaaggggccccaggagagggctgcatttcttgacagcctcatgctccagatgccctctgagctgcctctgagctcccgaaggatgaggctgacacattgtggcctccaagaaaagcacctagagcagctctgcaaggctctgggaggaagctgccacctcggtcacctccacctcgacttctcaggcaatgctctgggggatgaaggtgcagcccggctggctcagctgctcccagggctgggagctctgcagtccttgaacctcagtgagaacggtttgtccctggatgccgtgttgggtttggttcggtgcttctccactctgcagtggctcttccgcttggacatcagctttgaaagccaacacatcctcctgagaggggacaagacaagcagggatatgtgggccactggatctttgccagacttcccagctgcagccaagttcttagggttccgtcagcgctgcatccccaggagcctctgcctcagtgagtgtcctctggagcccccaagcctcacccgcctctgtgccactctgaaggactgcccgggacccctggaactgcaattgtcctgtgagttcctgagtgaccagagcctggagactctactggactgcttacctcaactccctcagctgagcctgctgcagctgagccagacgggactgtccccgaaaagccccttcctgctggccaacaccttaagcctgtgtccacgggttaaaaaggtggatctcaggtccctgcaccatgcaactttgcacttcagatccaacgaggaggaggaaggcgtgtgctgtggcaggttcacaggctgcagcctcagccaggagcacgtagagtcactctgctggttgctgagcaagtgtaaagacctcagccaggtggatctctcagcaaacctgctgggcgacagcggactcagatgccttctggaatgtctgccgcaggtgcccatctccggtttgcttgatctgagtcacaacagcatttctcaggaaagtgccctgtacctgctggagacactgccctcctgcccacgtgtccgggaggcctcagtgaacctgggctctgagcagagcttccggattcacttctccagagaggaccaggctgggaagacactcaggctaagtgagtgcagcttccggccagagcacgtgtccaggctggccaccggcttgagcaagtccctgcagctgacggagctcacgctgacccagtgctgcctgggccagaagcagctggccatcctcctgagcttggtggggcgacccgcagggctgttcagcctcagggtgcaggagccgtgggcggacagagccagggttctctccctgttagaagtctgcgcccaggcctcaggcagtgtcactgaaatcagcatctccgagacccagcagcagctctgtgtccagctggaatttcctcgccaggaagagaatccagaagctgtggcactcaggttggctcactgtgaccttggagcccaccacagccttcttgtcgggcagctgatggagacatgtgccaggctgcagcagctcagcttgtctcaggttaacctctgtgaggacgatgatgccagttccctgctgctgcagagcctcctgctgtccctctctgagctgaagacatttcggctgacctccagctgtgtgagcaccgagggcctcgcccacctggcatctggtctgggccactgccaccacttggaggagctggacttgtctaacaatcaatttgatgaggagggcaccaaggcgctgatgagggcccttgaggggaaatggatgctaaagaggctggacctcagtcaccttctgctgaacagctccaccttggccttgcttactcacagactaagccagatgacctgcctgcagagcctcagactgaacaggaacagtatcggtgatgtcggttgctgccacctttctgaggctctcagggctgccaccagcctagaggagctggacttgagccacaaccagattggagacgctggtgtccagcacttagctaccatcctgcctgggctgccagagctcaggaagatagacctctcagggaatagcatcagctcagccgggggagtgcagttggcagagtctctcgttctttgcaggcgcctggaggagttgatgcttggctgcaatgccctgggggatcccacagccctggggctggctcaggagctgccccagcacctgagggtcctacacctaccattcagccatctgggcccaggtggggccctgagcctggcccaggccctggatggatccccccatttggaagagatcagcttggcggaaaacaacctggctggaggggtcctgcgtttctgtatggagctcccgctgctcagacagatagacctggtttcctgtaagattgacaaccagactgccaagctcctcacctccagcttcacgagctgccctgccctggaagtaatcttgctgtcctggaatctcctcggggatgaggcagctgccgagctggcccaggtgctgccgcagatgggccggctgaagagagtggacctggagaagaatcagatcacagctttgggggcctggctcctggctgaaggactggcccaggggtctagcatccaagtcatccgcctctggaataaccccattccctgcgacatggcccagcacctgaagagccaggagcccaggctggactttgccttctttgacaaccagccccaggccccttggggtacttga

SEQ ID NO: 1038 - protein, 505 aa, Homo sapiens [sequence omitted]

SEQ ID NO: 1039 - DNA, 1518 bp, Homo sapiens
  source 1..1518: mol_type = genomic DNA
atgcgcctccgccgcctagcgctgttcccgggtgtggcgctgcttcttgccgcggcccgcctcgccgctgcctccgacgtgctagaactcacggacgacaacttcgagagtcgcatctccgacacgggctctgcgggcctcatgctcgtcgagttcttcgctccctggtgtggacactgcaagagacttgcacctgagtatgaagctgcagctaccagattaaaaggaatagtcccattagcaaaggttgattgcactgccaacactaacacctgtaataaatatggagtcagtggatatccaaccctgaagatatttagagatggtgaagaagcaggtgcttatgatggacctaggactgctgatggaattgtcagccacttgaagaagcaggcaggaccagcttcagtgcctctcaggactgaggaagaatttaagaaattcattagtgataaagatgcctctatagtaggttttttcgatgattcattcagtgaggctcactccgagttcctaaaagcagccagcaacttgagggataactaccgatttgcacatacgaatgttgagtctctggtgaacgagtatgatgataatggagagggtatcatcttatttcgtccttcacatctcactaacaagtttgagtacaagactgtggcatatacagagcaaaaaatgaccagtggcaaaattaaaaagtttatccaggaaaacatttttggtatctgccctcacatgacagaggacaataaagatttgatacagggcaaggacttacttattgcttactatgatgtggactatgaaaaggacgctaaaggttccaactactggagaaacagggtaatgatggtggcaaagaaattcctggatgctgggcacaaactcaactttgctgtagctagccgcaaaacctttagccatgaactttctgattttggcttggagagcactgctggagagattcctgttgttgctatcaggactgctaaaggagagaagtttgtcatgcaggaggagttctcgcgtgatgggaaggctctggagaggttcctgcagggttactttggtggcaatctgaagagatacctgaagtctgaccctatcccagagagcaatgatgggcctgtgaaggtagtggtagcagagaattttgatgaaatagtgaataatgaaaataaagatgtgctgattgaattttatgccccttggtgtggtcattgtaagaacctggagcccaagtataaagaacttggcgagaagctcagcaaagacccaaatatcgtcatagccaagatggatgccacagccaatgatgtgccttctccatatgaagtcagaggttttcctaccatatacttctctccagccaacaagaagctaaatccaaagaaatatgaaggtggccgtgaattaagtgattttattagctatctacaaagagaagctacaaacccccctgtaattcaagaagaaaaacccaagaagaagaagaaggcacaggaggatctctaa

SEQ ID NO: 1040 - protein, 244 aa, Homo sapiens
MAAAASPAILPRLAILPYLLFDWSGTGRADAHSLWYNFTIIHLPRHGQQWCEVQSQVDQKNFLSYDCGSDKVLSMGHLEEQLYATDAWGKQLEMLREVGQRLRLELADTELEDFTPSGPLTLQVRMSCECEADGYIRGSWQFSFDGRKFLLFDSNNRKWTVVHAGARRMKEKWEKDSGLTTFFKMVSMRDCKSWLRDFLMHRKKRLEPTAPPTMAPGLAQPKAIATTLSPWSFLIILCFILPGI

SEQ ID NO: 1041 - protein, 246 aa, Homo sapiens
MAAAAATKILLCLPLLLLLSGWSRAGRADPHSLCYDITVIPKFRPGPRWCAVQGQVDEKTFLHYDCGNKTVTPVSPLGKKLNVTTAWKAQNPVLREVVDILTEQLRDIQLENYTPKEPLTLQARMSCEQKAEGHSSGSWQFSFDGQIFLLFDSEKRMWTTVHPGARKMKEKWENDKVVAMSFHYFSMGDCIGWLEDFLMGMDSTLEPSAGAPLAMSSGTTQLRATATTLILCCLLIILPCFILPGI

SEQ ID NO: 1042 - protein, 244 aa, Homo sapiens
MAAAASPAFLLCLPLLHLLSGWSRAGWVDTHCLCYDFIITPKSRPEPQWCEVQGLVDERPFLHYDCVNHKAKAFASLGKKVNVTKTWEEQTETLRDVVDFLKGQLLDIQVENLIPIEPLTLQARMSCEHEAHGHGRGSWQFLFNGQKFLLFDSNNRKWTALHPGAKKMTEKWEKNRDVTMFFQKISLGDCKMWLEEFLMYWEQMLDPTKPPSLAPGTTQPKAMATTLSPWSLLIIFLCFILAGR

SEQ ID NO: 1043 - DNA, 735 bp, Homo sapiens
  source 1..735: mol_type = genomic DNA
atggcagcggccgccagccccgcgatccttccgcgcctcgcgattcttccgtacctgctattcgactggtccgggacggggcgggccgacgctcactctctctggtataacttcaccatcattcatttgcccagacatgggcaacagtggtgtgaggtccagagccaggtggatcagaagaattttctctcctatgactgtggcagtgacaaggtcttatctatgggtcacctagaagagcagctgtatgccacagatgcctggggaaaacaactggaaatgctgagagaggtggggcagaggctcagactggaactggctgacactgagctggaggatttcacacccagtggacccctcacgctgcaggtcaggatgtcttgtgagtgtgaagccgatggatacatccgtggatcttggcagttcagcttcgatggacggaagttcctcctctttgactcaaacaacagaaagtggacagtggttcacgctggagccaggcggatgaaagagaagtgggagaaggatagcggactgaccaccttcttcaagatggtctcaatgagagactgcaagagctggcttagggacttcctgatgcacaggaagaagaggctggaacccacagcaccacccaccatggccccaggcttagctcaacccaaagccatagccaccaccctcagtccctggagcttcctcatcatcctctgcttcatcctccctggcatctga

SEQ ID NO: 1044 - DNA, 741 bp, Homo sapiens
  source 1..741: mol_type = genomic DNA
atggcagcagccgccgctaccaagatccttctgtgcctcccgcttctgctcctgctgtccggctggtcccgggctgggcgagccgaccctcactctctttgctatgacatcaccgtcatccctaagttcagacctggaccacggtggtgtgcggttcaaggccaggtggatgaaaagacttttcttcactatgactgtggcaacaagacagtcacacctgtcagtcccctggggaagaaactaaatgtcacaacggcctggaaagcacagaacccagtactgagagaggtggtggacatacttacagagcaactgcgtgacattcagctggagaattacacacccaaggaacccctcaccctgcaggcaaggatgtcttgtgagcagaaagctgaaggacacagcagtggatcttggcagttcagtttcgatgggcagatcttcctcctctttgactcagagaagagaatgtggacaacggttcatcctggagccagaaagatgaaagaaaagtgggagaatgacaaggttgtggccatgtccttccattacttctcaatgggagactgtataggatggcttgaggacttcttgatgggcatggacagcaccctggagccaagtgcaggagcaccactcgccatgtcctcaggcacaacccaactcagggccacagccaccaccctcatcctttgctgcctcctcatcatcctcccctgcttcatcctccctggcatctga

SEQ ID NO: 1045 - DNA, 735 bp, Homo sapiens
  source 1..735: mol_type = genomic DNA
atggcagcggccgccagccccgccttccttctgtgcctcccgcttctgcacctgctgtctggctggtcccgggcaggatgggtcgacacacactgtctttgctatgacttcatcatcactcctaagtccagacctgaaccacagtggtgtgaagttcaaggcctggtggatgaaaggccttttcttcactatgactgtgttaaccacaaggccaaagcctttgcttctctggggaagaaagtcaatgtcacaaaaacctgggaagaacaaactgaaacactaagagacgtggtggatttccttaaagggcaactgcttgacattcaagtggagaatttaatacccattgagcccctcaccctgcaggccaggatgtcttgtgagcatgaagcccatggacacggcagaggatcttggcagttcctcttcaatggacagaagttcctcctctttgactcaaacaacagaaagtggacagcacttcatcctggagccaagaagatgacagagaagtgggagaagaacagggatgtgaccatgttcttccagaagatttcactgggggattgtaagatgtggcttgaagaatttttgatgtactgggaacaaatgctggatccaacaaaaccaccctctctggccccaggcacaacccaacccaaggccatggccaccaccctcagtccctggagccttctcatcatcttcctctgcttcattctagctggcagatga

SEQ ID NO: 1046 - protein, 252 aa, Homo sapiens
MCSRGWDSCLALELLLLPLSLLVTSIQGHLVHMTVVSGSNVTLNISESLPENYKQLTWFYTFDQKIVEWDSRKSKYFESKFKGRVRLDPQSGALYISKVQKEDNSTYIMRVLKKTGNEQEWKIKLQVLDPVPKPVIKIEKIEDMDDNCYLKLSCVIPGESVNYTWYGDKRPFPKELQNSVLETTLMPHNYSRCYTCQVSNSVSSKNGTVCLSPPCTLGKKDPWELRGAQGNWSCFEQRKAGGPIQPPCTVWW

SEQ ID NO: 1047 - protein, 243 aa, Homo sapiens
MCSRGWDSCLALELLLLPLSLLVTSIQGHLVHMTVVSGSNVTLNISESLPENYKQLTWFYTFDQKIVEWDSRKSKYFESKFKGRVRLDPQSGALYISKVQKEDNSTYIMRVLKKTGNEQEWKIKLQVLDPVPKPVIKIEKIEDMDDNCYLKLSCVIPGESVNYTWYGDKRPFPKELQNSVLETTLMPHNYSRCYTCQVSNSVSSKNGTVCLSPPCTLARSFGVEWIASWLVVTVPTILGLLLT

SEQ ID NO: 1048 - DNA, 1486 bp, Homo sapiens
  source 1..1486: mol_type = genomic DNA
ctttttctagccaggctctcaactgtctcctgcgttgctgggaagttctggaaggaagcatgtgctccagaggttgggattcgtgtctggctctggaattgctactgctgcctctgtcactcctggtgaccagcattcaaggtcacttggtacatatgaccgtggtctccggcagcaacgtgactctgaacatctctgagagcctgcctgagaactacaaacaactaacctggttttatactttcgaccagaagattgtagaatgggattccagaaaatctaagtactttgaatccaaatttaaaggcagggtcagacttgatcctcagagtggcgcactgtacatctctaaggtccagaaagaggacaacagcacctacatcatgagggtgttgaaaaagactgggaatgagcaagaatggaagatcaagctgcaagtgcttgaccctgtacccaagcctgtcatcaaaattgagaagatagaagacatggatgacaactgttatctgaaactgtcatgtgtgatacctggcgagtctgtaaactacacctggtatggggacaaaaggcccttcccaaaggagctccagaacagtgtgcttgaaaccacccttatgccacataattactccaggtgttatacttgccaagtcagcaattctgtgagcagcaagaatggcacggtctgcctcagtccaccctgtaccctgggtaagaaggatccctgggagctgaggggggcacagggtaactggagttgttttgaacaaagaaaggctgggggtcctattcagcctccttgcacagtgtggtggtgaatccctaaggtgtctgggagagctgggagacgtgggttctgccaccagctctaccaccacctcccagccagcttacctcaacttcgtgggggctcagtgttctcacctgcaaaggacgtttgggagagatctctgatactcctcttccctctcccgctctaacaaagcatagtcctaacatctgaggccagggtcatcatagagtagactgaaacatcagggtgagcagggagaaggaagggcaagtgggcgagcagctgtctagaggggcttcattagacagccgaagtcagccaaggaaagagggaccgaggtcattagaccgccaaagtcagccagggaaagagggactgaggagacgggcctgagagaggccgtcgaggaggcgtgagagcctgagcctcaggcgaagcttctcctccccagcctgatgttcctagatgaacttaggaagccagattcccctgtctcctgggaggatccactcatgagtgtcacacctggctctagatcaggcctacactggtgctagcatgggacagctaaggccatgggttttagagtcagtcatacctggggtcacttctaggactgtcacttactagctaaacaagttacttagcttccccaagtcatgttcttcctaaataaaggacaaaataacagtt

SEQ ID NO: 1049 - DNA, 1097 bp, Homo sapiens
  source 1..1097: mol_type = genomic DNA
ctttttctagccaggctctcaactgtctcctgcgttgctgggaagttctggaaggaagcatgtgctccagaggttgggattcgtgtctggctctggaattgctactgctgcctctgtcactcctggtgaccagcattcaaggtcacttggtacatatgaccgtggtctccggcagcaacgtgactctgaacatctctgagagcctgcctgagaactacaaacaactaacctggttttatactttcgaccagaagattgtagaatgggattccagaaaatctaagtactttgaatccaaatttaaaggcagggtcagacttgatcctcagagtggcgcactgtacatctctaaggtccagaaagaggacaacagcacctacatcatgagggtgttgaaaaagactgggaatgagcaagaatggaagatcaagctgcaagtgcttgaccctgtacccaagcctgtcatcaaaattgagaagatagaagacatggatgacaactgttatctgaaactgtcatgtgtgatacctggcgagtctgtaaactacacctggtatggggacaaaaggcccttcccaaaggagctccagaacagtgtgcttgaaaccacccttatgccacataattactccaggtgttatacttgccaagtcagcaattctgtgagcagcaagaatggcacggtctgcctcagtccaccctgtaccctggcccggtcctttggagtagaatggattgcaagttggctagtggtcacggtgcccaccattcttggcctgttacttacctgagatgagctcttttaactcaagcgaaacttcaaggccagaagatcttgcctgttggtgatcatgctcctcaccaggacagagactgtataggctgaccagaagcatgctgctgaattatcaacgaggattttcaagttaacttttaaatactggttattatttaattttatatccctttgttgttttctagtacacagagatatagagatacacatgcttttttcccacccaaaattgtgacaacattatgtgaatgttttattattttttaaaataaacatttgatataattgtcaattaactgaa

SEQ ID NO: 1050 - RNA, 20 nt, synthetic construct
  source 1..20: mol_type = other RNA
cgggccatggagggcccggg

SEQ ID NO: 1051 - RNA, 20 nt, synthetic construct
  source 1..20: mol_type = other RNA
gggccatggagggcccggga

SEQ ID NO: 1052 - RNA, 20 nt, synthetic construct
  source 1..20: mol_type = other RNA
ggccatggagggcccgggag

SEQ ID NO: 1053 - RNA, 20 nt, synthetic construct
  source 1..20: mol_type = other RNA
ctcacctatgactctgagcc

SEQ ID NO: 1054 - RNA, 20 nt, synthetic construct
  source 1..20: mol_type = other RNA
ttggctggggagaggaggag

SEQ ID NO: 1055 - RNA, 20 nt, synthetic construct
  source 1..20: mol_type = other RNA
tggctggggagaggaggaga

SEQ ID NO: 1056 - RNA, 20 nt, synthetic construct
  source 1..20: mol_type = other RNA
tacactcacagcgtacagag

SEQ ID NO: 1057 - RNA, 20 nt, synthetic construct
  source 1..20: mol_type = other RNA
acactcacagcgtacagaga

SEQ ID NO: 1058 - RNA, 20 nt, synthetic construct
  source 1..20: mol_type = other RNA
ggagggtctgggggaaatgg

SEQ ID NO: 1059 - RNA, 20 nt, synthetic construct
  source 1..20: mol_type = other RNA
gagggtctgggggaaatggg

SEQ ID NO: 1060 - RNA, 20 nt, synthetic construct
  source 1..20: mol_type = other RNA
caggctgtggggtaggaggt

SEQ ID NO: 1061 - RNA, 20 nt, synthetic construct
  source 1..20: mol_type = other RNA
gggctgtagtgggagagggg

SEQ ID NO: 1062 - RNA, 20 nt, synthetic construct
  source 1..20: mol_type = other RNA
ggagggctgtagtgggagag

SEQ ID NO: 1063 - RNA, 20 nt, synthetic construct
  source 1..20: mol_type = other RNA
tcctacctgctcagtgcatg

SEQ ID NO: 1064 - RNA, 20 nt, synthetic construct
  source 1..20: mol_type = other RNA
catttcctggaggtagagag

SEQ ID NO: 1065 - RNA, 100 nt, synthetic construct
  source 1..100: mol_type = other RNA
cgggccatggagggcccggggttttagagctagaaatagcaagttaaaataaggctagtccgttatcaacttgaaaaagtggcaccgagtcggtgctttt

SEQ ID NO: 1066 - RNA, 100 nt, synthetic construct
  source 1..100: mol_type = other RNA
gggccatggagggcccgggagttttagagctagaaatagcaagttaaaataaggctagtccgttatcaacttgaaaaagtggcaccgagtcggtgctttt

SEQ ID NO: 1067 - RNA, 100 nt, synthetic construct
  source 1..100: mol_type = other RNA
ggccatggagggcccgggaggttttagagctagaaatagcaagttaaaataaggctagtccgttatcaacttgaaaaagtggcaccgagtcggtgctttt

SEQ ID NO: 1068 - RNA, 100 nt, synthetic construct
  source 1..100: mol_type = other RNA
ctcacctatgactctgagccgttttagagctagaaatagcaagttaaaataaggctagtccgttatcaacttgaaaaagtggcaccgagtcggtgctttt

SEQ ID NO: 1069 - RNA, 100 nt, synthetic construct
  source 1..100: mol_type = other RNA
ttggctggggagaggaggaggttttagagctagaaatagcaagttaaaataaggctagtccgttatcaacttgaaaaagtggcaccgagtcggtgctttt

SEQ ID NO: 1070 - RNA, 100 nt, synthetic construct
  source 1..100: mol_type = other RNA
tggctggggagaggaggagagttttagagctagaaatagcaagttaaaataaggctagtccgttatcaacttgaaaaagtggcaccgagtcggtgctttt

SEQ ID NO: 1071 - RNA, 100 nt, synthetic construct
  source 1..100: mol_type = other RNA
tacactcacagcgtacagaggttttagagctagaaatagcaagttaaaataaggctagtccgttatcaacttgaaaaagtggcaccgagtcggtgctttt

SEQ ID NO: 1072 - RNA, 100 nt, synthetic construct
  source 1..100: mol_type = other RNA
acactcacagcgtacagagagttttagagctagaaatagcaagttaaaataaggctagtccgttatcaacttgaaaaagtggcaccgagtcggtgctttt

SEQ ID NO: 1073 - RNA, 100 nt, synthetic construct
  source 1..100: mol_type = other RNA
ggagggtctgggggaaatgggttttagagctagaaatagcaagttaaaataaggctagtccgttatcaacttgaaaaagtggcaccgagtcggtgctttt

SEQ ID NO: 1074 - RNA, 100 nt, synthetic construct
  source 1..100: mol_type = other RNA
gagggtctgggggaaatggggttttagagctagaaatagcaagttaaaataaggctagtccgttatcaacttgaaaaagtggcaccgagtcggtgctttt

SEQ ID NO: 1075 - RNA, 100 nt, synthetic construct
  source 1..100: mol_type = other RNA
caggctgtggggtaggaggtgttttagagctagaaatagcaagttaaaataaggctagtccgttatcaacttgaaaaagtggcaccgagtcggtgctttt

SEQ ID NO: 1076 - RNA, 100 nt, synthetic construct
  source 1..100: mol_type = other RNA
gggctgtagtgggagagggggttttagagctagaaatagcaagttaaaataaggctagtccgttatcaacttgaaaaagtggcaccgagtcggtgctttt

SEQ ID NO: 1077 - RNA, 100 nt, synthetic construct
  source 1..100: mol_type = other RNA
ggagggctgtagtgggagaggttttagagctagaaatagcaagttaaaataaggctagtccgttatcaacttgaaaaagtggcaccgagtcggtgctttt

SEQ ID NO: 1078 - RNA, 100 nt, synthetic construct
  source 1..100: mol_type = other RNA
tcctacctgctcagtgcatggttttagagctagaaatagcaagttaaaataaggctagtccgttatcaacttgaaaaagtggcaccgagtcggtgctttt

SEQ ID NO: 1079 - RNA, 100 nt, synthetic construct
  source 1..100: mol_type = other RNA
catttcctggaggtagagaggttttagagctagaaatagcaagttaaaataaggctagtccgttatcaacttgaaaaagtggcaccgagtcggtgctttt

SEQ ID NO: 1080 - protein, 255 aa, Homo sapiens [sequence omitted]

SEQ ID NO: 1081 - protein, 334 aa, Homo sapiens
MAAAASPAFLLRLPLLLLLSSWCRTGLADPHSLCYDITVIPKFRPGPRWCAVQGQVDEKTFLHYDCGSKTVTPVSPLGKKLNVTTAWKAQNPVLREVVDILTEQLLDIQLENYIPKEPLTLQARMSCEQKAEGHGSGSWQLSFDGQIFLLFDSENRMWTTVHPGARKMKEKWENDKDMTMSFHYISMGDCTGWLEDFLMGMDSTLEPSAGAPPTMSSGTAQPRATATTLILCCLLIMCLLICSRHSLTQSHGHHPQSLQPPPHPPLLHPTWLLRRVLWSDSYQIAKRPLSGGHVTRVTLPIIGDDSHSLPCPLALYTINNGAARYSEPLQVSIS

SEQ ID NO: 1082 - protein, 246 aa, Homo sapiens
MAAAAIPALLLCLPLLFLLFGWSRARRDDPHSLCYDITVIPKFRPGPRWCAVQGQVDEKTFLHYDCGNKTVTPVSPLGKKLNVTMAWKAQNPVLREVVDILTEQLLDIQLENYTPKEPLTLQARMSCEQKAEGHSSGSWQFSIDGQTFLLFDSEKRMWTTVHPGARKMKEKWENDKDVAMSFHYISMGDCIGWLEDFLMGMDSTLEPSAGAPLAMSSGTTQLRATATTLILCCLLIILPCFILPGI

SEQ ID NO: 1083 - DNA, 768 bp, Homo sapiens
  source 1..768: mol_type = genomic DNA
atgcgaagaatatccctgacttctagccctgtgtgccttcttttgtttctgctgttgctactaatagccttggagatcatggttggtggtcactctctttgcttcaacttcactataaaatcattgtccagacctggacagccctggtgtgaagcgcaggtcttcttgaataaaaatcttttccttcagtacaacagtgacaacaacatggtcaaacctctgggcctcctggggaagaaggtaaatgccaccagcacttggggagaattgacccaaacgctgggagaagtggggcgagacctcaggatgctcctttgtgacatcaaaccccagataaagaccagtgatccttccactctgcaagtcgagatgttttgtcaacgtgaagcagaacggtgcactggtgcatcctggcagttcgccaccaatggagagaaatccctcctctttgacgcaatgaacatgacctggacagtaattaatcatgaagccagtaagatcaaggagacatggaagaaagacagagggctggaaaagtatttcaggaagctctcaaagggagactgcgatcactggctcagggaattcttagggcactgggaggcaatgccagaaccgacagtgtcaccagtaaatgcttcagatatccactggtcttcttctagtctaccagatagatggatcatcctgggggcattcatcctgttagttttaatgggaattgttctcatctgtgtctggtggcaaaatggcagaagatccacctag

SEQ ID NO: 1084 - DNA, 1005 bp, Homo sapiens
  source 1..1005: mol_type = genomic DNA
atggcagcggccgccagccccgcgttccttctacgcctcccgcttctgctcctgctgtccagctggtgcaggaccgggctggccgaccctcactctctttgctatgacatcaccgtcatccctaagttcagacctggaccacggtggtgtgcggttcaaggccaggtggatgaaaagacttttcttcactatgactgtggcagcaagacagtcacacccgtcagtcccctggggaagaaactaaatgtcacaacggcctggaaagcacagaacccagtactgagagaggtggtggacatacttacagagcaactgcttgacattcagctggagaattacatacccaaggaacccctcaccctgcaggccaggatgtcttgtgagcagaaagccgaaggacacggcagtggatcttggcagctcagtttcgatggacagatcttcctcctctttgactcagaaaacagaatgtggacaacggttcatcctggagccagaaagatgaaagaaaagtgggagaatgacaaggatatgaccatgtccttccattacatctcaatgggagactgcacaggatggcttgaggacttcttgatgggcatggacagcaccctggagccaagtgcaggagcaccacccaccatgtcctcaggcacagcccaacccagggccacggccaccaccctcatcctttgctgcctcctcatcatgtgtctcctcatatgctccaggcacagtctgacccaaagccatggccaccaccctcagtccctgcagcctcctcctcatcctcccctgcttcatcctacctggctgctgaggagagtcctttggagtgacagctaccaaatagcgaagcgccccttgtctggtggacacgtgactcgcgtgactttacctatcattggagacgactcacactccttaccctgccctcttgccttgtatacaataaataacggcgcagccaggtattcggagccactacaggtctccatatcttga

SEQ ID NO: 1085 - DNA, 741 bp, Homo sapiens
  source 1..741: mol_type = genomic DNA
atggcagcagccgccatcccagctttgcttctgtgcctcccgcttctgttcctgctgttcggctggtcccgggctaggcgagacgaccctcactctctttgctatgacatcaccgtcatccctaagttcagacctggaccacggtggtgtgcggttcaaggccaggtggatgaaaagacttttcttcactatgactgtggcaacaagacagtcacacccgtcagtcccctggggaagaaactaaatgtcacaatggcctggaaagcacagaacccagtactgagagaggtggtggacatacttacagagcaactgcttgacattcagctggagaattacacacccaaggaacccctcaccctgcaggcaaggatgtcttgtgagcagaaagctgaaggacacagcagtggatcttggcagttcagtatcgatggacagaccttcctactctttgactcagagaagagaatgtggacaacggttcatcctggagccagaaagatgaaagaaaagtgggagaatgacaaggatgtggccatgtccttccattacatctcaatgggagactgcataggatggcttgaggacttcttgatgggcatggacagcaccctggagccaagtgcaggagcaccactcgccatgtcctcaggcacaacccaactcagggccacagccaccaccctcatcctttgctgcctcctcatcatcctcccctgcttcatcctccctggcatctga

SEQ ID NO: 1086 - DNA, 23 bp, synthetic construct
  source 1..23: mol_type = other DNA
tgacggccatcctcggcgtctgg

SEQ ID NO: 1087 - DNA, 23 bp, synthetic construct
  source 1..23: mol_type = other DNA
gacggccatcctcggcgtctggg

SEQ ID NO: 1088 - DNA, 23 bp, synthetic construct
  source 1..23: mol_type = other DNA
acggccatcctcggcgtctgggg

SEQ ID NO: 1089 - DNA, 23 bp, synthetic construct
  source 1..23: mol_type = other DNA
cgcactcacccgcccaggtctgg

SEQ ID NO: 1090 - DNA, 23 bp, synthetic construct
  source 1..23: mol_type = other DNA
gcactcacccgcccaggtctggg

SEQ ID NO: 1091 - DNA, 22 bp, synthetic construct
  source 1..22: mol_type = other DNA
cccaggctcgcactccatgagg

SEQ ID NO: 1092 - DNA, 23 bp, synthetic construct
  source 1..23: mol_type = other DNA
gtcactcaccggcctcgctctgg

SEQ ID NO: 1093 - DNA, 23 bp, synthetic construct
  source 1..23: mol_type = other DNA
ccttaccccatctcagggtgagg

SEQ ID NO: 1094 - DNA, 23 bp, synthetic construct
  source 1..23: mol_type = other DNA
cttaccccatctcagggtgaggg

SEQ ID NO: 1095 - DNA, 23 bp, synthetic construct
  source 1..23: mol_type = other DNA
ggctctgggaaaagaggggaagg

SEQ ID NO: 1096 - DNA, 23 bp, synthetic construct
  source 1..23: mol_type = other DNA
cttcccacagatagaaaaggagg

SEQ ID NO: 1097 - DNA, 23 bp, synthetic construct
  source 1..23: mol_type = other DNA
ttcccacagatagaaaaggaggg

SEQ ID NO: 1098 - DNA, 23 bp, synthetic construct
  source 1..23: mol_type = other DNA
cccaggcagtgacagtgcccagg

SEQ ID NO: 1099 - DNA, 23 bp, synthetic construct
  source 1..23: mol_type = other DNA
ccaggcagtgacagtgcccaggg

SEQ ID NO: 1100 - DNA, 23 bp, synthetic construct
  source 1..23: mol_type = other DNA
gacccgcatctcggcgtctgagg

SEQ ID NO: 1101 - DNA, 23 bp, synthetic construct
  source 1..23: mol_type = other DNA
gcactcaccggcccaggtctcgg

SEQ ID NO: 1102 - DNA, 23 bp, synthetic construct
  source 1..23: mol_type = other DNA
tgggagcctgggggcgaggaggg

SEQ ID NO: 1103 - DNA, 23 bp, synthetic construct
  source 1..23: mol_type = other DNA
gggagcctgggggcgaggagggg

SEQ ID NO: 1104 - DNA, 23 bp, synthetic construct
  source 1..23: mol_type = other DNA
ccccaggctcccactccatgagg

SEQ ID NO: 1105 - DNA, 23 bp, synthetic construct
  source 1..23: mol_type = other DNA
ttaccccatctcagggtgagggg

SEQ ID NO: 1106 - DNA, 23 bp, synthetic construct
  source 1..23: mol_type = other DNA
ttcccacaggtggaaaaggaggg

SEQ ID NO: 1107 - DNA, 23 bp, synthetic construct
  source 1..23: mol_type = other DNA
tgacccgcatctcggcgtctggg

SEQ ID NO: 1108 - DNA, 23 bp, synthetic construct
  source 1..23: mol_type = other DNA
gcactcacaggcccaggtctcgg

SEQ ID NO: 1109 - DNA, 23 bp, synthetic construct
  source 1..23: mol_type = other DNA
cacaggcccaggtctcggtcagg

SEQ ID NO: 1110 - DNA, 23 bp, synthetic construct
  source 1..23: mol_type = other DNA
agaccctggccccgcccccgtgg

SEQ ID NO: 1111 - DNA, 23 bp, synthetic construct
  source 1..23: mol_type = other DNA
ggctctgggaaaggaggggaagg

SEQ ID NO: 1112 - DNA, 23 bp, synthetic construct
  source 1..23: mol_type = other DNA
cccagccagcaacagtgcccagg

SEQ ID NO: 1113 - DNA, 26 bp, synthetic construct
  source 1..26: mol_type = other DNA
attgggaccgggagacacagaagtac

SEQ ID NO: 1114 - DNA, 26 bp, synthetic construct
  source 1..26: mol_type = other DNA
attacatcgccctgaacgaggacctg

SEQ ID NO: 1115 - DNA, 26 bp, synthetic construct
  source 1..26: mol_type = other DNA
attacatcgccctgaacgaggatctg

SEQ ID NO: 1116 - DNA, 26 bp, synthetic construct
  source 1..26: mol_type = other DNA
attgttgctggcctggctgtcctagc

SEQ ID NO: 1117 - DNA, 26 bp, synthetic construct
  source 1..26: mol_type = other DNA
attacatcgccctgaacgaggacctg

SEQ ID NO: 1118 - protein, 468 aa, Homo sapiens
MGTQEGWCLLLCLALSGAAETKPHPAEGQWRAVDVVLDCFLVKDGAHRGALASSEDRARASLVLKQVPVLDDGSLEDFTDFQGGTLAQDDPPIIFEASVDLVQIPQAEALLHADCSGKEVTCEISRYFLQMTETTVKTAAWFMANVQVSGGGPSISLVMKTPRVAKNEVLWHPTLNLPLSPQGTVRTAVEFQVMTQTQSLSFLLGSSASLDCGFSMAPGLDLISVEWRLQHKGRGQLVYSWTAGQGQAVRKGATLEPAQLGMARDASLTLPGLTIQDEGTYICQITTSLYRAQQIIQLNIQASPKVRLSLANEALLPTLICDIAGYYPLDVVVTWTREELGGSPAQVSGASFSSLRQSVAGTYSISSSLTAEPGSAGATYTCQVTHISLEEPLGASTQVVPPERRTALGVIFASSLFLLALMFLGLQRRQAPTGLGLLQAERWETTSCADTQSSHLHEDRTARVSQPS

SEQ ID NO: 1119 - DNA, 1739 bp, Homo sapiens
  source 1..1739: mol_type = genomic DNA
gtgaaagtgaaagaaaagtcggcagcagagggaacagggaagaaacctaaaggctgcaggctgccaggtgtgcttggagagcccccttcttccgccgggcctcgcaagcagcgtaggactgtggagaagggcggtgggcaaggagggaactcgagagcagcctccatgggcacacaggagggctggtgcctgctgctctgcctggctctatctggagcagcagaaaccaagccccacccagcagaggggcagtggcgggcagtggacgtggtcctagactgtttcctggtgaaggacggtgcgcaccgtggagctctcgccagcagtgaggacagggcaagggcctcccttgtgctgaagcaggtgccagtgctggacgatggctccctggaggacttcaccgatttccaagggggcacactggcccaagatgacccacctattatctttgaggcctcagtggacctggtccagattccccaggccgaggccttgctccatgctgactgcagtgggaaggaggtgacctgtgagatctcccgctactttctccagatgacagagaccactgttaagacagcagcttggttcatggccaacgtgcaggtctctggagggggacctagcatctccttggtgatgaagactcccagggtcgccaagaatgaggtgctctggcacccaacgctgaacttgccactgagcccccaggggactgtgcgaactgcagtggagttccaggtgatgacacagacccaatccctgagcttcctgctggggtcctcagcctccttggactgtggcttctccatggcaccgggcttggacctcatcagtgtggagtggcgactgcagcacaagggcaggggtcagttggtgtacagctggaccgcagggcaggggcaggctgtgcggaagggcgctaccctggagcctgcacaactgggcatggccagggatgcctccctcaccctgcccggcctcactatacaggacgaggggacctacatttgccagatcaccacctctctgtaccgagctcagcagatcatccagctcaacatccaagcttcccctaaagtacgactgagcttggcaaacgaagctctgctgcccaccctcatctgcgacattgctggctattaccctctggatgtggtggtgacgtggacccgagaggagctgggtggatccccagcccaagtctctggtgcctccttctccagcctcaggcaaagcgtggcaggcacctacagcatctcctcctctctcaccgcagaacctggctctgcaggtgccacttacacctgccaggtcacacacatctctctggaggagccccttggggccagcacccaggttgtcccaccagagcggagaacagccttgggagtcatctttgccagcagtctcttccttcttgcactgatgttcctggggcttcagagacggcaagcacctacaggacttgggctgcttcaggctgaacgctgggagaccacttcctgtgctgacacacagagctcccatctccatgaagaccgcacagcgcgtgtaagccagcccagctgacctaaagcgacatgagactactagaaagaaacgacacccttccccaagcccccacagctactccaacccaaacaacaaccaagccagtttaatggtaggaatttgtattttttgcctttgttcagaatacatgacattggtaaataaaaaaaaaaaaaaaaaaaaaa

SEQ ID NO: 1120 - DNA, 20358 bp, Homo sapiens
  source 1..20358: mol_type = genomic DNA
acacttcctgctgcgaaagacccacatgctacaagacgggcaaaataaagtgacagatgaccaccctgcagctctccagcttcctctctgaaatcccagtcccaaaatccagtttcctggccgcctcctggctcaggtcaggatctggcagaggaggtttctcagccggttatgttggggcctgcttaagggcgggggtgagaaaggtccccaggctactgtggatcctgtgtctgacttcagatccccttttcccacagttatagctccacttttttgggacaggtggggagcaaaagggtgcagaggtcaggtcttgaaatcaccaggggatttccgggtgaggtgggtggtgagaaaggaaacagcaagcagggctctggcagctgctgcagacggcttcacacagggacgcgggctgccatcttgctctaagtgaaagtgaaagaaaagtcggcagcagagggaacagggaagaaacctaaaggctgcaggctgccaggtgtgcttggagagcccccttcttccgccgggcctcgcaagcagcgtaggactgtggagaagggcggtgggcaaggagggaactcgagagcagcctccatgggcacacaggagggctggtgcctgctgctctgcctggctctatctggagcagcagaaaccagtgagtctgggagtcggggagagctggctgggagaagagctactgaagccccagggtgccaccctccccgagattccagaagagcaaaggggccggggatgaccccatcgccttctaagcccaacaggggaaaggctcagcggctggcaaaggaaggaaccaatagtgtgtgtggagggagggtggggactccacagggaaaatgctaaagaggggctgcctctgtggctgtggtcaggagccactgtcctacagagagggcactggcctgggagctgacacttcagaagaggaaaggactccccaggtgaggaaatcacttggaaggtgaccttgaaggcgggggaggggaaggctacccgaaatgggagaaagcagtgcaggctgtcagtgccccagcaacagtaactgtccagtctcctctctctgcggtggcacttgcttgttttctgagaattcctttgactgaaaagatagtcttttattcaacagttggaaatgcaagcataaactcctctgagcaaggcaaatccaggactttaactctcaccaagaagtatttgcctggactagcaggtgctctccagaaagctggtttggggatgacgggagaatagagggacacagaaacagctaggatcttggatggcaacttttaccctttgatgactccacagcttgagggcgggggcaggaagcaagtgtggagtagctttctggggaaggcggtgctcaccccagcctttgtctgcagagccccacccagcagaggggcagtggcgggcagtggacgtggtcctagactgcttcctggcgaaggacggtgcgcaccgtggagctctcgccagcagtgaggacagggcaagggcctcccttgtgctgaagcaggtgccagtgctggacgatggctccctggaggacttcaccgatttccaagggggcacactggcccaagatgacccacctattatctttgaggcctcaggtaaaagccttccacctgtgtccttggtcctcccgggctccctccaccaggacagcccaggtcccgattacagccacacatactgcctcccgttggccctggtgttctcacgctaatttgccctctgtgtgtgccctgcttctccccagtggacctggtccagattccccaggccgaggccttgctccatgctgactgcagtgggaaggaggtgacctgtgagatctcccgctactttctccagatgacagagaccactgttaagacagcagcttggttcatggccaacatgcaggtctctggagggggacctagcatctccttggtgatgaagactcccagggtcaccaagaatgaggcgctctggcacccgacgctgaacttgccactgagcccccaggggactgtgcgaactgcaggtaagaaaatgaaaagcaaggccaggtgtggtggctcacgcctgtaattccagaattttgggataccgaggtcggtggatcacctgaggtcaggagtttgagatcagcctggtcaacacggtgaaaccccgtctctactaataccaaaattagccgggcatggtggcgggtgcctgtaatcccagctacgagggaggctgaggcaggagaatcgcttgaacccggaaggcagaggttgcggtgagccgagatcacaccatggcacttcagcctgggcaacaagagcgaaactccatctcaaaaaaaaaaaagaaaagaaaagaaaagcaagtcacagaaagttttgcttttctaaagtggtaagatatggggcacagaagaagaaagggaacaaatccacctccatccacactggtcacctcagggcacccctaggccttggtcctttcttcctaaaaacccctgagtcaggccaggtgcgaaggcccatgcctgtaatcccagcactttgggaggccaaggcaggtggatcacctgaggtcaggagttcaagaccagcctggccaacatggtgaaaccccctctctactaaaatacagaaattagccgggcatgatggcaggtgcctgtaatcccagctactcaggagactgagacgggagaatcacttgaacctgagagacggtggttgcagtgagccgagattgcgccactgcactccagcctgggcagctgagtgagacaccgtctcaaaaacaacaacaacaacaaaaaccctgagtccacaagagaatgcttcgcagcccctacctgaacgtccccaggcacacagacaacctgtgttatttccaaaatggagatcgttctcatctcactgggctgccatgaggaaataagacacatgatgctattctgtacatgggtgctgtccactgtagtcttatcgagccaaaacccggttttctcccagtgaaatgctaggctgctctggtgcttcaggggtaaagctcagggatgcatcatttgttcatgatcttattagtaaacccagtacttgccctctccagctcagcacatcctcgagggcacaagaaattgagaacatgatgacagggttccccagagcccattaatccaatactctgtgccctgcttctttgagtctccaagaagaaacagccaagtccagagaaaattaggggcaaccgtcctatccttggaaaaccccagaacactctaacctctctgtggtccaacctaaatctatcctgacccattagaaaaaggtcttcatgtctgtccagtgtctaccatactcctggcatgcgtaggtatttctctctttttattccaaacctacaaaaaaaggtgaaataataatataatgaacacctatataccctacacctagatccaccagttgttaacaatttgccacattctctctcccccgactcctcatgtgtgtatatgtgtacgtgtgtattttcctctgaactgagagtaagttgcagaagataacacttgaaccccaaacgcatgtttgaaccccgaaacgcatgtttaaaccccaaatacatccatagcatgtattagtttacaatgaaggacaaggatgtaatccttcatagttacaaagccatcatgtcagaaacaaaccaaagtggggaagtagtctacccgtagcgcaggcaataagggagtgcagactgtaaaatatttcagaacaaaaataaaatcagctaaaagtcagatggctttatagtctcaccatctcccgacactggcaattctgaatattatcagtgataaaatactcctctctgctagggcagactgtccctatctccccacacgactgcctagtatgccacagatcttcatacttttagatattttttaattgatatgataatagtctcaactataaagtccagggcatggtggtgcacacctgtagtccagctactcaggagactgaggcaggaggattgcttgagcccaggagtttgagtcctgtctgggcaacatagagagcgagaccctctttttttttttttttttttaacagtctcattctgtctcccaggctggagtgcagtggcatgatcttggctcactgcaacctctgcctcccaggttcaagtgattcttgtgcctcagtctcccaagtagctgggattatagacgcccgccaccacaccagctaatttttgtatttttagtagagatggggtttcaccatattggccaggctggtcttgaactcctgacctcaggtgatccacccatctcggcctcccaaagtgttgggattacaggcgtgagccactgtgcccaacctaagacccttctctttaaaaaataattaaatgtctccaaattcaaatttctccacttgtcccaatatttttttttttactgctttttctaagtacacaattcaaacaagaatcatgcagtgcatttagttgtgctgttccttgttttaatctagaacatgtttcatagaattgacatttttgaagggtccaggctagtggtcttgtagagtatcccaacatttagatttgtctgattgttttcctcatttcctcatgactggatttaggttaagcatgtttggcacagatactactatcacatgcttttttttttttttttcgatatggagttttactcttattgcccaggctggagtgcaatggctcgatcttggctcaccacaacctccgcctcctgggttcaagtgattctccacctgagcctcccaagtagctgggattacaggcatgcgccacgacacccagctaatttttgtatttttagtagagacggggtttctccatgttggtcaggctggtctcaaactcccaacctcaggtgatccacccgcctgggcttcccaataccacgtgtgtttttttgttttgttttgttttttacattttttttgagacggagtttcactcgtcgcccagactggagtgcaatggcgcgatcttggctcactgcaacctccacctcccggattcaagcaattctcctgtctcagcctcccaagtagctggaattacaggcacctgccaccatgcccggctaatttttgtgtttttagtagagacagggttttaccatgttggccaggctggtctcaaactcctgacctcaggtgatccacccacctcggccccccaaagtgctgggattaccggcatgagccaccgcacccagccaccacgtactttttaaactattgtttctagtcttcacagcatccttgcttaagcaggtgagcttggtaacaccaagtgacttgtcaaaggtcacggagccagtaagtggaacaaccagggtttcagagctttttctgctactctagtagttcttacctgaagattgatggtaactcttaattttgcatgtgtatttttcctggtgggagatccatagctttcactaaattatcctagagtaagtgatcccaaaatggtgatggccatcatgtgtaccatgctacctttccagagccccatttctttgtggttccatgtgatggaaaataagctcaaccggcctgtcaggcgaggaagaggcaggtgtatgcccacaacatgcccacagcttggagatcaggtgacctcaaggaggaagtagcccacaaatcacccctcttttcctcttcacagtggagttccaggtgatgacacagacccaatccctgagcttcctgctggggtcctcagcctccttggactgtggcttctccatggcaccgggcttggacctcatcagtgtggagtggcgactgcagcacaagggcaggggtcagttggtgtacagctggaccgcagggcaggggcaggctgtgcggaagggcgctaccctggagcctgcacaactgggcatggccagggatgcctccctcaccctgcccggcctcactatacaggacgaggggacctacatttgccagatcaccacctctctgtaccgagctcagcagatcatccagctcaacatccaaggtgaggccaggacatggttatcccagggaaggggatataacatgtctactgggagcgtttccagattgggacccaaatgcaagaatgatttcctgagaagcaggcttcaatcccacaacttaaatgccatcttcaccatggaagcacagatggcatcagataaggagtcccgttggactccaggataattccaccaagagatttccagcccaggatcctgctgccctgctgtggctggctgtctccatcaccccagtccttttggaccacatcctgaggagcagcagcagcaaaccaaggcagagcagtggaagcggttctgaccattatcactgctatcctttaaaatctctggcttagaggccgggcgcggtggctcacacctataatcccagcactttgggaggcggatcacgaggtcaggagttcaagaccagcctggccaatacggtgaaactccgtctctactaaaaatacaaaaaatagctaggcatggtggtgcgcgcctgtagtcccagctactcaggaggctgaggcagaagaatcgcttgaaccccggaggtggaggttgcggtgagccaagatcatgccactgcactccagcttgggcgacagagcaagacaccatcttaaaaaaaaaaaaaaaactggcttagaatgacagtaagaagccagccaatctttagttggctttactatctgttttctggaaaatgtaaccctgcccccttacggcctgcatccaggtgggcccctcacacacccccgccttggtacaccaccaagggacactgtagcctccacaatctactctcatcttggcaggaagaaaaggcttcaggctcctccgctgtccccagttagatccatgtgtaatcttattcctcattctttctccagcttcccctaaagtacgactgagcttggcaaacgaagctctgctgcccaccctcatctgcgacattgctggctattaccctctggatgtggtggtgacgtggacccgagaggagctgggtggatccccagcccaagtctctggtgcctccttctccagcctcaggcaaagcgtggcaggcacctacagcatctcctcctctctcaccgcagaacctggctctgcaggtgccacttacacctgccaggtcacacacatctctctggaggagccccttggggccagcacccaggttgtcccaccaggtactgggagtgtcctccttttccccacctccacactagggctcatggctctcctgccccagctcatctatggccttgttctgctgcccatccactttgttcgcagccctggcttcatgctcctgcctctgctcctgactattttcccaaggcggcagctgccacagcttctaccacacatcccctgagacttcattatactccagcctccagggtgtcaggcaatgtgcttaaggctggagatcacagatgaataattcctgatcatgccctccaggagcttagtccagtaatagagacaagactaagtagacagagaagatggcatttgagccaagttaactagcttagagggaagggaacactcaagatagaaacaatagcatatatgaaagccaaatcataaaacagcctaaagagaatttggagaattgcaagtaattcagcacagctagagcttagggtatatgggaaaaagggaaagtggctctgaagcttcggaggtaattctatttattgagcatttacatgaatcaagcagtgtagaaagcacttaaatgtatgatttcatggatcatgactcccattttacaggtgagtaaactggcacttgcagatgtcaatgaatttgcccaaggtcacctatcaatcaatggtaaagagagaatgtgaaaaacaggcaaccggattccccttacgggcttaattaaaccctgtagatctcactgggccttcaagctggaacttcctgagagccatagcatgctgttgaaaggttttatttatttatttatttatttatttatttatttatttattttattttattttactttttttcgatacagaatcttgctctgttccccaggctggagtgcagtggtatgatctcagctcactgcaacctccatatcctgggttcaagccatcctcttgcctcagcctcccaagtagctgggattacaggcgcgcaccaccacgcctggctaattttgcgtttttagtagagatggggtttcgccatgatggccaggctggtctcaaactcctgacctcaggtgatctgtccgcctcggcttcccaaagtgctgggattacagatatgagccaccgcaccctgcctgtcgagaggttttaagcaggaaagggacaggaaagaacccgcaacttgaagtggaaacatccaggagcactgggcattatttggttgctcattagactgtgaacttccccaaaactgaggtttcacttcagctcacatcattccccaactatttacaaaatcccagttaactggtggttttttgttttgctttgttttattttgttttgttttgagatagggtctcactctgtcgcccaggctggagtgcagtggcacgatctcagctcactgcaaactctgcctcccaggctcaagtgattctcccacctcagcctcccaagtacctgggaccacaggcgcacaccaacatgcccagttaattttttgtattttttgtacagacagggtttcaccatgttgcccaggctggtctcgaactcctgacctcaggtgatccacctacctcagcctcccaaagttctgggattacaggcatgagccactgtgtccaggcaagttaagtgctaacaaataaacccacctaaatctcacttgcaaagcaatttttaaaaccttgtccttaggtgggaagaggtagagaattctgtgtggagtaactcacaagtatccagcaaccttgaataagaacaaatgctgctgagtgccttgttccaggctcctcaaccagggactcacacacacaatccttagctcctcctccctggggtggacactgcaggtgagggctcagctcatgattcctgcgcacgatgatccccgcccacgttgctctcacctacagagcggagaacagccttgggagtcatctttgccagcagtctcttccttcttgcactgatgttcctggggcttcagagacggcaaggtaagagcctgggtgcccttggctctggccctggcccacctcacccactctaaccacccccccgcccagaccagggtggaagcccagatgccccaagctccagccacccacccatcacagcctcctgcttttgagtttgccctaaatgaaaatgaaaccagtcgtgttccctcgttttctcctagctacctcactaaagtctgtcactctcctgcctcagagtagaaagaaagagtagtcacgtgctcccagaaggactctaagtcaagtcacagagctaaaaatacatgaaggtggcaccagctcatggggcactgggcctggctctgcagaggcctctgccttccttcactgtgcaccctgggctcatgcaccaaggcagagaacaggaagaagtgaggggacaagaagaaggcagaatgtccagatggaggataagaccaaagagccaggttggtggtgtgacggtaggaaaacaaagctggaggaaatggagaaggaacaagtgagggacaatgaggcatgggttggggctgggctacccctcccaaactcagctctgtcaaaataaaaggcccttgtgtctgctgcgaccaagcttttccactttcctgtctttctccacactggtcccaactgagccctgtcaccaagcctagcggctccaacttgcaaagtgtttaagtatgaaacaaaggccctcagaggcacccccgtggctccatctcagttgcacctcagctgcaattagggttctgctccctcgggtgactgctgggaggttcaggatacctgcaaatgcctcactccctcagctgcaaggagagacttctcctttttattcgtttctaaaatgtgcctaatcaatacggtggaactcagcataccaaaactgtacgtgaggatgatggggaaaagggggtaagggggtgttcactgacagccttatctgggcacatcccctgggacaggacaagcaggccaaggacctaggaaggagcacaggaggcagatggaagaggcctgagggaacctgtgcttgtttgccagtgtgagatgcccacgcaacttcctgtcttcacttcctcttaccagcacctacaggacttgggctgcttcaggctgaacgctgggagaccacttcctgtgctgacacacagagctcccatctccatgaagaccgcacagcgcgtgtaagccagcccagctgacctaaagcgacatgagactactagaaagaaacgacacccttccccaagcccccacagctactccaacccaaacaacaaccaagccagtttaatggtaggaatttgtattttttgcctttgttcagaatacatgacattggtaaatatgccacatgcctttggtggaagtacaactgttgttattactctatacaagtatgagatcagggttaggaaaaaaagacaaagaggtgatgacagacacacagtggaaaccccacatcgtctcatggcaaaccgaagaacgggatgtgggaagctcagcttcatttgactgcaaagtcccagggttttgttgcacatttgctcatgcacatgggtggtgggaggaaagggggatagcagagacacacagaagagggtacagggtgggtgagaaagaaagtagaagggctaatacccccaaagaacaaggccaactacacctggtgagcctcagagggacagaaacccaggaatgattcctgtgatagggctgggagagccaagaggacggattcgctccaggcttgggacacatcgaggacagtggtggttcttctccagcggtgaccccctgcattaggcaaggaggagcccagaggagagtggagaccttcgaggggggccgttgggagggtactgactgctttcttccagctcttcagtcccgcccttgggcaggacgaagggaatgtgggaaacaagggcgaaaggaaaggaaggatggttttgagcaatgaaatgctgctgcatggaaagtgggcatccagaccctgcccagcatggcctcagcctcttcctgttcgtggaccgagggaagaaggaataaagggccatgggcattctccgctctgttcccagcctgccctcctccccttgcacctgggcttatcccacattaatagcccatcctgaagctcagcaattgccccgaagataggctgagcagatcccatcctcaggttccactgtctatacacacaaaccatgcaaagaggaggaagagaaaggaggcaaagtagaattcagacaggaaagggtggttcaaaggggaatatactacaggaagaacagagaggcggctctcaaggagagggccccatgacagcacagcaatacacaagcacacctgacacaggctggcacgcctccccccaaggtggggctggtgggtctacatgacttctctgcatcctgaggatcggccgggccccaggaagaaccacttgcctcatccctgtctttggcaagtgcacgggtggtgtggaggaaaggattccatgggtgtccaaagatctcacactgctaacaccctcacgctccttcatcaacaggaagagaggaacaggaccctctttaacgagggcaaggagtggcttcctctgagcttgttactttcaaattaagcacttgactcactgtttctctataactaacaggcaatctctctctttatgccaacaattaactgggagctaggttaaattatttggctagataaaactaccagctagatggatttatttggtgccctcatacagaatgctgtagaaaatgtaaagaagagaaagctccttccagctagaagcacatgggactgcttctaggatggaaacaagtcctgctattttcacaatccctaagtgttctccaggcctctggagaacaaagtaaagttgtaagatccccaaagacacggaaaatcctggacgaacagattagaaataactacaaaaaacaagtttttactttcgaaaagggtactgcactgaaaccaagttggactttggtccacccccaggaccctcttcaggcctggtccaggaaggaaagctccacatgaccaggcagtactgagtgagctgccatcttcccagcccctccctagctcctaccagtggccaggttttctagaagtcaccatgggcaccgatactcttctcctcccaagtctgggcagcttcatgggtacttcgcctcagccactcccctccctgccccttcccttggcctccaactctttggggctttgggggaacttgagagtacagaaaaagcaggcagggaggaggcgccagctgttgctcttcgggtaatgacttagattgtgccacgagcagcatttctagtgttgagggacagagtgcaaatgaacgcaacgaaaaaggaggaatgggtgatggagaagcctgggctggaatggaggacggtgggtggggaagtgtgttgagagagcaaacagagggcagaggacatgaatgtggatggcaatggacaacagggaaggggtggtacattctcaagtaaaaaagtagactggacacaggaatcaggaagtcccagacggaaaagagaaagagacaggagaaaacaagagggtgaattacaccaagttaccagacattcaggtctctccattgttaagtgccccatccccatggtctccctccaacccaagccagtgacacacagcatagccccacttcctcagaacaggaggcgccatctccctgcaatgcgttgcagggggaaggcttgtccatcaaagaaatcccttgtctctgcccttcccccgtcccgaaccaggtgacgatcccatagcagcggtctccatacctcagtcagagcagccccactccccaggcaggcaggcaggcagggagaagactccaggaccttcccacctcttcaccccaccagcaacttcagcgatacttacttacaataactaccacgatgatggcacagatggctcccagcatgatcatcatctgaggaaacatggacaaaaaatgagcccttggatttcaggaatgaggaaaagagccacatctctagtgggaaacagaattccttccatccttgggacaatggaaaaaaccacccatcacccaggagacctgcaggcctcttagagaggccctacccttctgcttcccaggggatcataaccacagtatgtctgtagcttttcagattcatcacaggacctgcattgagctcctttttgcttagttcctggtgtcttggggctttagaaggcattccaatagagatacagactctggatatttaaccaattagttcaattttcactgtgaagtgttcagctcattctcaaaagttgcagttatttaaaaatatatatttcaatctgagaaagctgatttaaaagaaaaagaaaaaagtatatatatatataaatgtatatatatgtatatatatatataaatgtatatatatgtatatatatatataaatgtatatatatgtatatatacatatgtgtatatatagtgtgtgtgtgtgtgtgtgtgtgtgtatgtatatatgcctgagccattgtgctgatgttgggtgtgtctgaggatgagacaggtgaaattttttgcaggcaactcctttggggtaaagctccttaactaaccattccaaactcctcagggtatcactttttccctgatagcggttctaaatactctagcctaccctggtggccaattctgggtaatgcaatctcaagaggaggctttccagatttcctcccaagcgttatgctggtcagagagatcctgcaccattagagggaagaaatgtagaagctgagggttttcttgccttctaccagtggaagcccaggaaaagatggaggaggggacaagaaaattcaccttgcagtttttccaccaatacttcctctttagcttggcagcactgctctcaaattgtgatgctcctgcctgcaaggcatcagctcggtcatccagctctgacagcttctggtccctctccaggaccttgtccacgttcacacgtatgatgtccaccacctgaggagggcacagaaacaaagcagctaagcttcctgccagagacagaggaaaggacaacaaccagagaatcacaagtctggccctgtgcaactctaaagggtgctttgcctctcagggcctttgactattctcctacgaaaaaaggagaaaagataagaagttcccttttgtttccaaactcctagatttggaaactttcagagaaacagctatctacctacctcctccacttgtgcctgggtttgctgtagtcgtctgttactggtcatgttaggaggagggccagggggacccccacctggggcagtcccttctgtcccttcagcaggtggctgagctggagcagacctgtggaaagacatgtgcagagtacacaaagtgaccaagacaagaaaggagctgggcgtggtagcacacacctgtagtcccagctactcaagaggctgaagtgggaggagcgcttgagcccaggagttcgaggccagcctgggcatcatagcgagaccccatctctaaaaaaacagacaaaaagaaaggactcacatgcatcctcaccccaaaccacttaaacaattatgattaggctatacaaaactagaatggattcttgctccttggcaatctgaagtagggagacaaaccatagaggcaagaagtaaaagatgaaagactctgcaacaacatttggatggggttcagggacatccaggatggcatcaagacatctcatctggggctatcctttgactcaactcaaacaagtcctctgccatgatggctacagggacatatggcctagccttgtcctaaatggcatttccccgctgatatggtttggctgtgtccccacccaaatctcaacttcaattgtatcacccagaattcccacatgttgtgggagggactcaggggaggtaactgaatcatggggcccatctttccggtgctattctggtgatagtgacgaagtctcatgagatctgatgggtttatcagtggtttctgcttttgcttcttccacattttctcttgctgctgccatgtaagaagtgcctttcacctgccgccatgattctgaggccttcccagccatgtggaactgtaagtccaattaaacctctttttcttcccagtcttgggtatgtctttatcagcagcatgaaaacagactaatacagtaaattggtaccagtagagtggggtgttgctgaaaagatacccaaaaatgtggaagcgactttggaactgggttaacagggagaggatggaacagtttggagggctcagaagaagacaggaaaatgcgggaaagtttggaacctcctagagacttgttgaatggctttgacaaaaatgctgttagtgatatgaacaataaggtccaggctgaggtggtctcagatggagatgaggaacttgttgggaactgaagcaaaggtgactcttgttatgttttggcaaaaagactggcagcattttgcccctgccctagaaatttgtggaactttgaacttgagagagataatttagggtatctggcagaagaaaagacgcagtactaaagaaaaaaaccatttttttgagaagaaattcaaggcagctgcagaaatttgcataagtagcaaggaacctagtgttagcccctaagaccatggggaaaatgtctccaggccatgtcagaagccttcatagcagcccctcccatcacaggcctggaggcccaggaggaaaaagttattttgtgggccaggcccagggtccccatgctgtgtgcagcctagggacttagtgccctgtgtcccagccgctcccactgtggctgagaggggccaatgcagggctcgggccgtggcttcagagggtggaagccccaagccttggcagcttccacatggtgttgagcctgcagatgcacagaaggcaagaactgaggttcgggaacctccgtctagacttcagaagatgtatggaaacgcctggatgtccaggcaaaagtttgctgcaagggcagggccctcatggagaacctctgctagtgtagtacagaagggacatgtggggttggagcccccacacagagtccccactggaacactgcctagtggagctatgagaaaaaggtcaccattctccagaccccagaatggtagatccactggtagcttgcaccgtgcgcctggaaaagccacagacactcaatgccagtccgtgaagggagccaggagggaggctgtacactgtaatgtctgtcagctcacccctttttatattcaagttattggttatggttattggtttatatgcccagttattggttatgcttcacacaagatgaggaaatcagggctgccataagggcagcttggaaaatcaccaaaggcaaagtctatgtaggtggagtgagtcaggactgtttgtttgctttgtttttggcagagaaaatgggggtttcacttagatagaatctggggcccaaagcaattacattagttatggaaactgttccaagagcatagacaggaagcaaaaatgctagaaattgtcctcaatgtgcatgcattatagacattctgtcccttccttttctggatttgacagtctcagatgactcccttggttacttacatcccaaagagagatcttggtttactgtactatacacacagagaatgttctctcattctgtaccactcaaagttagtgtgtggtcttcaagacaaactcctctccatgtcccaaaacatggaggctaaactcacctcctaaagaattcccagaagtataacctaagtcatgagatgttctcggccaaggaagcacccacaggcaggggggagatctctcaaatttgatggagaatagaaattacagtaagaactcctcaaacagaagcagaatctcaccaaacatacttcacaggagcagtccaagagtaaatgcaacaaaaatgaaaccacaaagtcacctaaaaggaaattatttgactaattacaatagaactaatacccagaagctcattctccttgattaagtgaatttcttttagtctaaaaagatagagaataactcctcagagaggctatggtagcagattacacctgactcattccccatttgaagaatcacttttccatttccctctaaggtgcaaaggaggtaaagcaaagatagacacaaagtcatgggagccacaagactcttgtcctgccactgagctagctaagcaatctagctctcgacttaaggcagaaaattcaatgagtaggtagcagccagtgttggaagcagtccaggatggtagcaccaatgacaagattaaggtcagagacctcgtgatgccccgctagccaccacgatttttctgttgccttctgttcatcccacgtagatactatctggaagccccctccccaaaatgaaaacaactggaattctacggcttgcccaaaatgcatagaacactcatatctggttaaaaccatagaaatcaaaaagaaaaagtgaaatggctatgaagtatttgcaaggccaatttcacttactacttgttgggagttggaaacactcaacagtaaaatatctagggataattacaacccttatgtaacacaagtaaatctttcccttttttgtcacttagagaagcaacataaatacatctaggaccaggccagggtagtaatcagaaagaaaaatctgtattagacatattgaggtcttgacagagaagtacttcgtttgtttagccgtagttttccctcaagatcatgcgaagggggtgatgttgaagactgctggagactaaactgtgtgtgttggaggaaagggggaaagctcagctctccctatttctcctccaactatttggtaagactcggtgatagaaaaacatctcctatacgaatggccttggtatgaacagccgcttgggatgacaggccactatcccactaccccttgagtctttctgagctgctcacctggtgccagagaactggcagataagtttctgcagctttgctcactgccatgaggggggctagacatcacactttgggtgaggggtaaacaaatccagagattgtagggcaacataagttaccaactggcagttgcacccatgactgtctttcctgaggcgctgagtagtgatttagccagatgacagaaatacctttcgagtcccctgcccagttgtctccatccaccacccccagcccccgccctctccgagtctccactataccaaaaccagaatgaggcgccactcagacgagaggagagggtgcaatgattgtgggacccctgcgcccctgccccgcccgtggggtgctagctgtggctggtgcgagaatggggtgctggcccccctccctgggggtggcccggtccggaagcggcgcgcggtggtagttccccgcgttgctgcagctgctgcattgcgccattttccgtcccgcagaatcgggagcttggggcgagagttgtcaaggaggtgccgagcccccacaccagagtcaactcacatttttctgacagagagagtgagggtctgttcctctccggaggctgcggcgagacacccggtgagggacgctgcggctgaagtggacggaactgccaagctccgcctcgcgccgactaccccgcggtctagctgcgctggaacttactgcagctgccgcgccggcctccgcctttattagtgctgaccacgcctcccggataacggtgacaaccccgcggcccaatccatgcccaggacggtcgcccagcgctacaggcctagcccgccccgcccctgccaattgccagtcacaactctcctctcatccgactccggaaaggagcggttgctgtgaggatccttcagtgatcaatgcgaccatagtttgcgctccagtctggcggagggacggggcggggtggagatgaggtctgtcccttcggagggcgcttcagcagtttgttaggcatttgtggtgcctcccaaccaatcgctaggcagttactgaagaccgtgcccgcccctgccccaccccgcgccgggactcgcgcattcagctggaggcggcggcttcctggtgcgcgcccagccctggtgccctgctctggccctcgctccgcaccaccgccccgcctctaactaacgctctgagagggtgcaggagcctcgagacacagccacaagctcctggtgccagataccggatgcggggttccgtcccaccaaagcaagcacgaagctttcgttcattcgtttctttcaacatagccttcctaaattgaactccctcccaaacctgctccagtcgaggttaccacatcgactcagttgcccagaccagaaacgtggaaaccatcctagatttcctccccttcacctttacctctcccccagtaatctgccaaatcgagttgatttttccttcttggcattccagtgattatctcccctctgctcactattatccctttcctggactccatcagttggaaaattcaccattattttatgtcccgctaagaaaaaaggttacaaggccgggcgcagtggctcacacctgtaatcccagcactttgggaggccgagtcaggcagattacctgagatcaggagttcgagaccagcctggccaacatggcgaaacctctgtctctactaaaaatacaaaacagccaggcatggtggcgggcgcctgtaatcccagctactcgtgaggctgagataagagaatcgcttgaagccgggagccgacggttgcagtgagccgagatcacgccactgcactccagcctgggcaacagagcaagaccctgtttcaaaaaaaaaaagaaaaaaggttgcaaattatctgtgacaaatgctttccttaccacttagcatttttgttttacatgtattgaaaatatgggtttatatacataccgatttctatatttcactcttgtgcatgcataaaaagggaaatagaaaacaataacatggtaactatccctaaaa

SEQ ID NO: 1121 - RNA, 20 nt, synthetic construct
  source 1..20: mol_type = other RNA
accgcccagacccggagcag

SEQ ID NO: 1122 - RNA, 20 nt, synthetic construct
  source 1..20: mol_type = other RNA
gcggggtctgagtgtagaga

SEQ ID NO: 1123 - RNA, 20 nt, synthetic construct
  source 1..20: mol_type = other RNA
gaggtccagggtctcaggtc

SEQ ID NO: 1124 - RNA, 20 nt, synthetic construct
  source 1..20: mol_type = other RNA
gtagaatccagtcagtgagg

SEQ ID NO: 1125 - RNA, 20 nt, synthetic construct
  source 1..20: mol_type = other RNA
gaaccaacactcgatcaccg

SEQ ID NO: 1126 - RNA, 20 nt, synthetic construct
  source 1..20: mol_type = other RNA
aggtccagggtctcaggtca

SEQ ID NO: 1127 - RNA, 20 nt, synthetic construct
  source 1..20: mol_type = other RNA
gctcacccaaagccacagcg

SEQ ID NO: 1128 - RNA, 20 nt, synthetic construct
  source 1..20: mol_type = other RNA
cacccagcacctcagcctgg

SEQ ID NO: 1129 - RNA, 20 nt, synthetic construct
  source 1..20: mol_type = other RNA
aagccagttactcatcaggg

SEQ ID NO: 1130 - RNA, 20 nt, synthetic construct
  source 1..20: mol_type = other RNA
actcacgctggatagcctcc

SEQ ID NO: 1131 - RNA, 20 nt, synthetic construct
  source 1..20: mol_type = other RNA
tgttccgagagctgatctca

SEQ ID NO: 1132 - RNA, 20 nt, synthetic construct
  source 1..20: mol_type = other RNA
cccctggagaaagagaagag

SEQ ID NO: 1133 - RNA, 20 nt, synthetic construct
  source 1..20: mol_type = other RNA
ccctccaggctgccttcagg

SEQ ID NO: 1134 - RNA, 20 nt, synthetic construct
  source 1..20: mol_type = other RNA
ctccacctgaggaaagacat

SEQ ID NO: 1135 - RNA, 20 nt, synthetic construct
  source 1..20: mol_type = other RNA
ttccgagagctgatctcatg

SEQ ID NO: 1136 - RNA, 20 nt, synthetic construct
  source 1..20: mol_type = other RNA
aagtcaacttcaatgtcgga

SEQ ID NO: 1137 - RNA, 20 nt, synthetic construct
  source 1..20: mol_type = other RNA
gcacctgtccccctgtgggc

SEQ ID NO: 1138 - RNA, 20 nt, synthetic construct
  source 1..20: mol_type = other RNA
ctccccatgagatcagctct

SEQ ID NO: 1139 - RNA, 20 nt, synthetic construct
  source 1..20: mol_type = other RNA
ggactctccgcgccccggtg

SEQ ID NO: 1140 - RNA, 20 nt, synthetic construct
  source 1..20: mol_type = other RNA
tggcccatttcgcagaggcg

SEQ ID NO: 1141 - RNA, 20 nt, synthetic construct
  source 1..20: mol_type = other RNA
ggatttgcctagcttcccca

SEQ ID NO: 1142 - RNA, 20 nt, synthetic construct
  source 1..20: mol_type = other RNA
ctggcccatttcgcagaggc

SEQ ID NO: 1143 - RNA, 20 nt, synthetic construct
  source 1..20: mol_type = other RNA
tcgatctatgaaaaagacag

SEQ ID NO: 1144 - RNA, 20 nt, synthetic construct
  source 1..20: mol_type = other RNA
gacccagaagccaactatgg

SEQ ID NO: 1145 - RNA, 20 nt, synthetic construct
  source 1..20: mol_type = other RNA
ttgtgccacagggctgctgc

SEQ ID NO: 1146 - RNA, 20 nt, synthetic construct
  source 1..20: mol_type = other RNA
gtacctgtgtcatagccctg

SEQ ID NO: 1147 - RNA, 20 nt, synthetic construct
  source 1..20: mol_type = other RNA
cctacctgccaaaggagaag

SEQ ID NO: 1148 - RNA, 100 nt, synthetic construct
  source 1..100: mol_type = other RNA
accgcccagacccggagcaggttttagagctagaaatagcaagttaaaataaggctagtccgttatcaacttgaaaaagtggcaccgagtcggtgctttt

SEQ ID NO: 1149 - RNA, 100 nt, synthetic construct
  source 1..100: mol_type = other RNA
gcggggtctgagtgtagagagttttagagctagaaatagcaagttaaaataaggctagtccgttatcaacttgaaaaagtggcaccgagtcggtgctttt

SEQ ID NO: 1150 - RNA, 100 nt, synthetic construct
  source 1..100: mol_type = other RNA
gaggtccagggtctcaggtcgttttagagctagaaatagcaagttaaaataaggctagtccgttatcaacttgaaaaagtggcaccgagtcggtgctttt

SEQ ID NO: 1151 - RNA, 100 nt, synthetic construct
  source 1..100: mol_type = other RNA
gtagaatccagtcagtgagggttttagagctagaaatagcaagttaaaataaggctagtccgttatcaacttgaaaaagtggcaccgagtcggtgctttt

SEQ ID NO: 1152 - RNA, 100 nt, synthetic construct; identical to SEQ ID NO: 885
  source 1..100: mol_type = other RNA

SEQ ID NO: 1153 - RNA, 100 nt, synthetic construct
  source 1..100: mol_type = other RNA
aggtccagggtctcaggtcagttttagagctagaaatagcaagttaaaataaggctagtccgttatcaacttgaaaaagtggcaccgagtcggtgctttt

SEQ ID NO: 1154 - RNA, 100 nt, synthetic construct; identical to SEQ ID NO: 880
  source 1..100: mol_type = other RNA

SEQ ID NO: 1155 - RNA, 100 nt, synthetic construct; identical to SEQ ID NO: 633
  source 1..100: mol_type = other RNA

SEQ ID NO: 1156 - RNA, 100 nt, synthetic construct
  source 1..100: mol_type = other RNA
aagccagttactcatcaggggttttagagctagaaatagcaagttaaaataaggctagtccgttatcaacttgaaaaagtggcaccgagtcggtgctttt

SEQ ID NO: 1157 - RNA, 100 nt, synthetic construct; identical to SEQ ID NO: 642
  source 1..100: mol_type = other RNA

SEQ ID NO: 1158 - RNA, 100 nt, synthetic construct
  source 1..100: mol_type = other RNA
tgttccgagagctgatctcagttttagagctagaaatagcaagttaaaataaggctagtccgttatcaacttgaaaaagtggcaccgagtcggtgctttt

SEQ ID NO: 1159 - RNA, 100 nt, synthetic construct
  source 1..100: mol_type = other RNA
cccctggagaaagagaagaggttttagagctagaaatagcaagttaaaataaggctagtccgttatcaacttgaaaaagtggcaccgagtcggtgctttt

SEQ ID NO: 1160 - RNA, 100 nt, synthetic construct
  source 1..100: mol_type = other RNA
ccctccaggctgccttcagggttttagagctagaaatagcaagttaaaataaggctagtccgttatcaacttgaaaaagtggcaccgagtcggtgctttt

SEQ ID NO: 1161 - RNA, 100 nt, synthetic construct; identical to SEQ ID NO: 597
  source 1..100: mol_type = other RNA

SEQ ID NO: 1162 - RNA, 100 nt, synthetic construct
  source 1..100: mol_type = other RNA
ttccgagagctgatctcatggttttagagctagaaatagcaagttaaaataaggctagtccgttatcaacttgaaaaagtggcaccgagtcggtgctttt

SEQ ID NO: 1163 - RNA, 100 nt, synthetic construct; identical to SEQ ID NO: 657
  source 1..100: mol_type = other RNA

SEQ ID NO: 1164 - RNA, 100 nt, synthetic construct
  source 1..100: mol_type = other RNA
gcacctgtccccctgtgggcgttttagagctagaaatagcaagttaaaataaggctagtccgttatcaacttgaaaaagtggcaccgagtcggtgctttt

SEQ ID NO: 1165 - RNA, 100 nt, synthetic construct
  source 1..100: mol_type = other RNA
ctccccatgagatcagctctgttttagagctagaaatagcaagttaaaataaggctagtccgttatcaacttgaaaaagtggcaccgagtcggtgctttt

SEQ ID NO: 1166 - RNA, 100 nt, synthetic construct
  source 1..100: mol_type = other RNA
ggactctccgcgccccggtggttttagagctagaaatagcaagttaaaataaggctagtccgttatcaacttgaaaaagtggcaccgagtcggtgctttt

SEQ ID NO: 1167 - RNA, 100 nt, synthetic construct
  source 1..100: mol_type = other RNA
tggcccatttcgcagaggcggttttagagctagaaatagcaagttaaaataaggctagtccgttatcaacttgaaaaagtggcaccgagtcggtgctttt

SEQ ID NO: 1168 - RNA, 100 nt, synthetic construct
  source 1..100: mol_type = other RNA
ggatttgcctagcttccccagttttagagctagaaatagcaagttaaaataaggctagtccgttatcaacttgaaaaagtggcaccgagtcggtgctttt

SEQ ID NO: 1169 - RNA, 100 nt, synthetic construct; identical to SEQ ID NO: 887
  source 1..100: mol_type = other RNA

SEQ ID NO: 1170 - RNA, 100 nt, synthetic construct; identical to SEQ ID NO: 648
  source 1..100: mol_type = other RNA

SEQ ID NO: 1171 - RNA, 100 nt, synthetic construct
  source 1..100: mol_type = other RNA
gacccagaagccaactatgggttttagagctagaaatagcaagttaaaataaggctagtccgttatcaacttgaaaaagtggcaccgagtcggtgctttt

SEQ ID NO: 1172 - RNA, 100 nt, synthetic construct
  source 1..100: mol_type = other RNA
ttgtgccacagggctgctgcgttttagagctagaaatagcaagttaaaataaggctagtccgttatcaacttgaaaaagtggcaccgagtcggtgctttt

SEQ ID NO: 1173 - RNA, 100 nt, synthetic construct; identical to SEQ ID NO: 591
  source 1..100: mol_type = other RNA

SEQ ID NO: 1174 - RNA, 100 nt, synthetic construct; identical to SEQ ID NO: 600
  source 1..100: mol_type = other RNA

SEQ ID NO: 1175 - RNA, 118 nt, synthetic construct
  source 1..118: mol_type = other RNA
gttctgtcttttggtcaggacaaccgtctagctataagtgctgcagggtgtgagaaactcctattgctggacgatgtctcttacgaggcattagcacagagtctctcagctggtacac

SEQ ID NO: 1176 - RNA, 119 nt, synthetic construct
  source 1..119: mol_type = other RNA
gttctgtcttttggtcaggacaaccgtctagctataagtgctgcagggtgtgaggaaactcctattgctggacgatgtctcttacgaggcattagcacaccgattttgattctcaaaca

SEQ ID NO: 1177 - RNA, 117 nt, synthetic construct
  source 1..117: mol_type = other RNA
gttctgtcttttggtcaggacaaccgtctagctataagtgctgcagggtgtgagaaactcctattgctggacgatgtctcttacgaggcattagcactcaaacaaatgtgcacaaag

SEQ ID NO: 1178 - RNA, 118 nt, synthetic construct
  source 1..118: mol_type = other RNA
gttctgtcttttggtcaggacaaccgtctagctataagtgctgcagggtgtgagaaactcctattgctggacgatgtctcttacgaggcattagcactcaaacaaatgtgtcacaaag

SEQ ID NO: 1179 - RNA, 117 nt, synthetic construct
  source 1..117: mol_type = other RNA
gttctgtcttttggtcaggacaaccgtctagctataagtgctgcagggtgtgagaaactcctattgctggacgatgtctcttacgaggcattagcactttgagaatcaaaatcggta

SEQ ID NO: 1180 - RNA, 118 nt, synthetic construct
  source 1..118: mol_type = other RNA
gttctgtcttttggtcaggacaaccgtctagctataagtgctgcagggtgtgagaaactcctattgctggacgatgtctcttacgaggcattagcactgatgtgtatatcacagacaa

SEQ ID NO: 1181 - RNA, 116 nt, synthetic construct
  source 1..116: mol_type = other RNA
gttctgtcttttggtcaggacaaccgtctagctataagtgctgcagggtgtgagaaactcctattgctggacgatgtctcttacgaggcattagcagttgctccaggccacagcat

SEQ ID NO: 1182 - RNA, 118 nt, synthetic construct
  source 1..118: mol_type = other RNA
gttctgtcttttggtcaggacaaccgtctagctataagtgctgcagggtgtgagaaactcctattgctggacgatgtctcttacgaggcattagcacttccagaagacaccttcttcc

SEQ ID NO: 1183 - RNA, 118 nt, synthetic construct
  source 1..118: mol_type = other RNA
gttctgtcttttggtcaggacaaccgtctagctataagtgctgcagggtgtgagaaactcctattgctggacgatgtctcttacgaggcattagcaccagaagacaccttcttcccca

SEQ ID NO: 1184 - RNA, 117 nt, synthetic construct
  source 1..117: mol_type = other RNA
gttctgtcttttggtcaggacaaccgtctagctataagtgctgcagggtgtgagagaaactcctattgctggacgatgtctcttacgaggcattagcacggttccgaatcctcctga

SEQ ID NO: 1185 - RNA, 118 nt, synthetic construct
  source 1..118: mol_type = other RNA
gttctgtcttttggtcaggacaaccgtctagctataagtgctgcagggtgtgagaaactcctattgctggacgatgtctcttacgaggcattagcacggaacccaatcactgacaggt

SEQ ID NO: 1186 - RNA, 117 nt, synthetic construct
  source 1..117: mol_type = other RNA
gttctgtcttttggtcaggacaaccgtctagctataagtgctgcagggtgtgagaaactcctattgctggacgatgtctcttacgaggcattagcacagagtctctcagctggtaca

SEQ ID NO: 1187 - RNA, 117 nt, synthetic construct
  source 1..117: mol_type = other RNA
gttctgtcttttggtcaggacaaccgtctagctataagtgctgcagggtgtgagaaactcctattgctggacgatgtctcttacgaggcattagcacaccgattttgattctcaaac

SEQ ID NO: 1188 - RNA, 117 nt, synthetic construct
  source 1..117: mol_type = other RNA
gttctgtcttttggtcaggacaaccgtctagctataagtgctgcagggtgtgagaaactcctattgctggacgatgtctcttacgaggcattagcactgattctcaaacaaatgtgt

SEQ ID NO: 1189 - RNA, 117 nt, synthetic construct
  source 1..117: mol_type = other RNA
gttctgtcttttggtcaggacaaccgtctagctataagtgctgcagggtgtgagaaactcctattgctggacgatgtctcttacgaggcattagcactcaaacaaatgtgtcacaaa

SEQ ID NO: 1190 - RNA, 117 nt, synthetic construct
  source 1..117: mol_type = other RNA
gttctgtcttttggtcaggacaaccgtctagctataagtgctgcagggtgtgagaaactcctattgctggacgatgtctcttacgaggcattagcacgtttgagaatcaaaatcggt

SEQ ID NO: 1191 - RNA, 117 nt, synthetic construct
  source 1..117: mol_type = other RNA
gttctgtcttttggtcaggacaaccgtctagctataagtgctgcagggtgtgagaaactcctattgctggacgatgtctcttacgaggcattagcactgatgtgtatatcacagaca

SEQ ID NO: 1192 - RNA, 117 nt, synthetic construct
  source 1..117: mol_type = other RNA
gttctgtcttttggtcaggacaaccgtctagctataagtgctgcagggtgtgagaaactcctattgctggacgatgtctcttacgaggcattagcacgttgctccaggccacagcac

SEQ ID NO: 1193 - RNA, 117 nt, synthetic construct
  source 1..117: mol_type = other RNA
gttctgtcttttggtcaggacaaccgtctagctataagtgctgcagggtgtgagaaactcctattgctggacgatgtctcttacgaggcattagcacttccagaagacaccttcttc

SEQ ID NO: 1194 - RNA, 117 nt, synthetic construct
  source 1..117: mol_type = other RNA
gttctgtcttttggtcaggacaaccgtctagctataagtgctgcagggtgtgagaaactcctattgctggacgatgtctcttacgaggcattagcaccagaagacaccttcttcccc

SEQ ID NO: 1195 - RNA, 117 nt, synthetic construct
  source 1..117: mol_type = other RNA
gttctgtcttttggtcaggacaaccgtctagctataagtgctgcagggtgtgagaaactcctattgctggacgatgtctcttacgaggcattagcacggttccgaatcctcctcctg

SEQ ID NO: 1196 - RNA, 117 nt, synthetic construct
  source 1..117: mol_type = other RNA
gttctgtcttttggtcaggacaaccgtctagctataagtgctgcagggtgtgagaaactcctattgctggacgatgtctcttacgaggcattagcacggaacccaatcactgacagg

SEQ ID NO: 1197 - RNA, 108 nt, synthetic construct
  source 1..108: mol_type = other RNA
gacctatagggtcaatgaatctgtgcgtgtgccataagtaattaaaaattacccaccacaggagcacctgaaaacaggtgcttggcacagagtctctcagctggtaca

SEQ ID NO: 1198 - RNA, 108 nt, synthetic construct
  source 1..108: mol_type = other RNA
gacctatagggtcaatgaatctgtgcgtgtgccataagtaattaaaaattacccaccacaggagcacctgaaaacaggtgcttggcacaccgattttgattctcaaac

SEQ ID NO: 1199 - RNA, 108 nt, synthetic construct
  source 1..108: mol_type = other RNA
gacctatagggtcaatgaatctgtgcgtgtgccataagtaattaaaaattacccaccacaggagcacctgaaaacaggtgcttggcactgattctcaaacaaatgtgt

SEQ ID NO: 1200 - RNA, 108 nt, synthetic construct
  source 1..108: mol_type = other RNA
gacctatagggtcaatgaatctgtgcgtgtgccataagtaattaaaaattacccaccacaggagcacctgaaaacaggtgcttggcactcaaacaaatgtgtcacaaa

SEQ ID NO: 1201 - RNA, 108 nt, synthetic construct
  source 1..108: mol_type = other RNA
gacctatagggtcaatgaatctgtgcgtgtgccataagtaattaaaaattacccaccacaggagcacctgaaaacaggtgcttggcacgtttgagaatcaaaatcggt

SEQ ID NO: 1202 - RNA, 108 nt, synthetic construct
  source 1..108: mol_type = other RNA
gacctatagggtcaatgaatctgtgcgtgtgccataagtaattaaaaattacccaccacaggagcacctgaaaacaggtgcttggcactgatgtgtatatcacagaca

SEQ ID NO: 1203 - RNA, 108 nt, synthetic construct
  source 1..108: mol_type = other RNA
gacctatagggtcaatgaatctgtgcgtgtgccataagtaattaaaaattacccaccacaggagcacctgaaaacaggtgcttggcacgttgctccaggccacagcac

SEQ ID NO: 1204 - RNA, 108 nt, synthetic construct
  source 1..108: mol_type = other RNA
gacctatagggtcaatgaatctgtgcgtgtgccataagtaattaaaaattacccaccacaggagcacctgaaaacaggtgcttggcacttccagaagacaccttcttc

SEQ ID NO: 1205 - RNA, 108 nt, synthetic construct
  source 1..108: mol_type = other RNA
gacctatagggtcaatgaatctgtgcgtgtgccataagtaattaaaaattacccaccacaggagcacctgaaaacaggtgcttggcaccagaagacaccttcttcccc

SEQ ID NO: 1206 - RNA, 108 nt, synthetic construct
  source 1..108: mol_type = other RNA
gacctatagggtcaatgaatctgtgcgtgtgccataagtaattaaaaattacccaccacaggagcacctgaaaacaggtgcttggcacggttccgaatcctcctcctg

SEQ ID NO: 1207 - RNA, 108 nt, synthetic construct
  source 1..108: mol_type = other RNA
gacctatagggtcaatgaatctgtgcgtgtgccataagtaattaaaaattacccaccacaggagcacctgaaaacaggtgcttggcacggaacccaatcactgacagg

SEQ ID NO: 1208 - RNA, 100 nt, synthetic construct
  source 1..100: mol_type = other RNA
ttcgtatctgtaaaaccaaggttttagagctagaaatagcaagttaaaataaggctagtccgttatcaacttgaaaaagtggcaccgagtcggtgctttt

SEQ ID NO: 1209 - RNA, 100 nt, synthetic construct
  source 1..100: mol_type = other RNA
ttacctgtaccataaccagggttttagagctagaaatagcaagttaaaataaggctagtccgttatcaacttgaaaaagtggcaccgagtcggtgctttt

SEQ ID NO: 1210 - RNA, 100 nt, synthetic construct
  source 1..100: mol_type = other RNA
ctcttacctgtaccataaccgttttagagctagaaatagcaagttaaaataaggctagtccgttatcaacttgaaaaagtggcaccgagtcggtgctttt

SEQ ID NO: 1211 - RNA, 100 nt, synthetic construct
  source 1..100: mol_type = other RNA
tgcacctctggggaggacctgttttagagctagaaatagcaagttaaaataaggctagtccgttatcaacttgaaaaagtggcaccgagtcggtgctttt

SEQ ID NO: 1212 - RNA, 100 nt, synthetic construct
  source 1..100: mol_type = other RNA
cctacctgtcaccaggaccagttttagagctagaaatagcaagttaaaataaggctagtccgttatcaacttgaaaaagtggcaccgagtcggtgctttt

SEQ ID NO: 1213 - RNA, 100 nt, synthetic construct
  source 1..100: mol_type = other RNA
cacctacctaagaaccatccgttttagagctagaaatagcaagttaaaataaggctagtccgttatcaacttgaaaaagtggcaccgagtcggtgctttt

SEQ ID NO: 1214 - RNA, 20 nt, synthetic construct
  source 1..20: mol_type = other RNA
ctcgatgcgaggactctcca

SEQ ID NO: 1215 - RNA, 20 nt, synthetic construct
  source 1..20: mol_type = other RNA
tctcgatgcgaggactctcc

SEQ ID NO: 1216 - RNA, 20 nt, synthetic construct
  source 1..20: mol_type = other RNA
catcgagataacctcgtgct

SEQ ID NO: 1217 - RNA, 20 nt, synthetic construct
  source 1..20: mol_type = other RNA
tggccgggctcaggcacgag

SEQ ID NO: 1218 - RNA, 20 nt, synthetic construct
  source 1..20: mol_type = other RNA
gcccactggtaggggtgctg

SEQ ID NO: 1219 - RNA, 20 nt, synthetic construct
  source 1..20: mol_type = other RNA
tgggctcggtggtgggactt

SEQ ID NO: 1220 - RNA, 20 nt, synthetic construct
  source 1..20: mol_type = other RNA
cgagcccactacgagacgga

SEQ ID NO: 1221 - RNA, 20 nt, synthetic construct
  source 1..20: mol_type = other RNA
ctcgtagtgggctcggtggt

SEQ ID NO: 1222 - RNA, 20 nt, synthetic construct
  source 1..20: mol_type = other RNA
gccgtgaaggcgtcggccgg

SEQ ID NO: 1223 - RNA, 20 nt, synthetic construct
  source 1..20: mol_type = other RNA
gtttctgagtttcaggattc

SEQ ID NO: 1224 - RNA, 20 nt, synthetic construct
  source 1..20: mol_type = other RNA
catcgggaggaagaacacac

SEQ ID NO: 1225 - RNA, 20 nt, synthetic construct
  source 1..20: mol_type = other RNA
ggaggaagaacacacgggta

SEQ ID NO: 1226 - RNA, 20 nt, synthetic construct
  source 1..20: mol_type = other RNA
gagcgctgggctgcatcaga

SEQ ID NO: 1227 - RNA, 20 nt, synthetic construct
  source 1..20: mol_type = other RNA
tgatctcgatccgagggctc

SEQ ID NO: 1228 - RNA, 20 nt, synthetic construct
  source 1..20: mol_type = other RNA
acggagtgatctcgatccga

SEQ ID NO: 1229 - RNA, 20 nt, synthetic construct
  source 1..20: mol_type = other RNA
gcggaggcattcgtgcgccg

SEQ ID NO: 1230 - RNA, 20 nt, synthetic construct
  source 1..20: mol_type = other RNA
gccgcgctcagaaacttctg

SEQ ID NO: 1231 - RNA, 20 nt, synthetic construct
  source 1..20: mol_type = other RNA
gggcctcgggcctgagccct

SEQ ID NO: 1232 - RNA, 20 nt, synthetic construct
  source 1..20: mol_type = other RNA
cctcgggctggcggccaccc

SEQ ID NO: 1233 - RNA, 20 nt, synthetic construct
  source 1..20: mol_type = other RNA
ccactcgcccgtgccccgtc

SEQ ID NO: 1234 - RNA, 20 nt, synthetic construct
  source 1..20: mol_type = other RNA
gcattcgtgcgccgaggcct

SEQ ID NO: 1235 - RNA, 20 nt, synthetic construct
  source 1..20: mol_type = other RNA
gagcctcaccccagcgctcc

SEQ ID NO: 1236 - RNA, 20 nt, synthetic construct
  source 1..20: mol_type = other RNA
gaggggctccgggagcgctg

SEQ ID NO: 1237 - RNA, 20 nt, synthetic construct
  source 1..20: mol_type = other RNA
agggctggtcttccacatct

SEQ ID NO: 1238 - RNA, 20 nt, synthetic construct
  source 1..20: mol_type = other RNA
gcggggagcccaggccaaag

SEQ ID NO: 1239 - RNA, 20 nt, synthetic construct
  source 1..20: mol_type = other RNA
gccaccatgaagaccttttg

SEQ ID NO: 1240 - RNA, 20 nt, synthetic construct
  source 1..20: mol_type = other RNA
ttgcggcacacctgagtacc

SEQ ID NO: 1241 - RNA, 20 nt, synthetic construct
  source 1..20: mol_type = other RNA
gtaggagaactgggggaagt

SEQ ID NO: 1242 - RNA, 20 nt, synthetic construct
  source 1..20: mol_type = other RNA
ctcctactcggccagcggca

SEQ ID NO: 1243 - RNA, 20 nt, synthetic construct
  source 1..20: mol_type = other RNA
gaaaaccttctgtgggaccc

SEQ ID NO: 1244 - RNA, 20 nt, synthetic construct
  source 1..20: mol_type = other RNA
agtaggagaactgggggaag

SEQ ID NO: 1245 - RNA, 20 nt, synthetic construct
  source 1..20: mol_type = other RNA
gttgcaagtctgacatttga

SEQ ID NO: 1246 - RNA, 20 nt, synthetic construct
  source 1..20: mol_type = other RNA
gaaacactacctggtacaca

SEQ ID NO: 1247 - RNA, 20 nt, synthetic construct
  source 1..20: mol_type = other RNA
tgtggcagacctacagtgta

SEQ ID NO: 1248 - RNA, 20 nt, synthetic construct
  source 1..20: mol_type = other RNA
gggcacaccttgcattggta

SEQ ID NO: 1249 - RNA, 20 nt, synthetic construct
  source 1..20: mol_type = other RNA
ctgcgcacctggcattcatg

SEQ ID NO: 1250 - RNA, 20 nt, synthetic construct
  source 1..20: mol_type = other RNA
cctaccggtccgcaagcgtc

SEQ ID NO: 1251 - RNA, 20 nt, synthetic construct
  source 1..20: mol_type = other RNA
actcacacatctggataggt

SEQ ID NO: 1252 - RNA, 20 nt, synthetic construct
  source 1..20: mol_type = other RNA
gacttacctagaccttcctg

SEQ ID NO: 1253 - RNA, 20 nt, synthetic construct
  source 1..20: mol_type = other RNA
aatcttacagagctgaaaag

SEQ ID NO: 1254 - RNA, 20 nt, synthetic construct
  source 1..20: mol_type = other RNA
catcatattcttcacttcca

SEQ ID NO: 1255 - RNA, 20 nt, synthetic construct
  source 1..20: mol_type = other RNA
aagaatatgatgttcctccc

SEQ ID NO: 1256 - RNA, 20 nt, synthetic construct
  source 1..20: mol_type = other RNA
cccctaaaccacgaccgcgc

SEQ ID NO: 1257 - RNA, 20 nt, synthetic construct
  source 1..20: mol_type = other RNA
tcctgcgcggtcgtggttta

SEQ ID NO: 1258 - RNA, 20 nt, synthetic construct
  source 1..20: mol_type = other RNA
ccctactctgtgaccaactg

SEQ ID NO: 1259 - RNA, 20 nt, synthetic construct
  source 1..20: mol_type = other RNA
cgcaggcgcgtcttccaggt

SEQ ID NO: 1260 - RNA, 20 nt, synthetic construct
  source 1..20: mol_type = other RNA
gcaccgcaggcgcgtcttcc

SEQ ID NO: 1261 - RNA, 20 nt, synthetic construct
  source 1..20: mol_type = other RNA
gaacaagagcaatgactttg

SEQ ID NO: 1262 - RNA, 20 nt, synthetic construct
  source 1..20: mol_type = other RNA
cacctacctaagaaccatcc

SEQ ID NO: 1263 - RNA, 20 nt, synthetic construct
  source 1..20: mol_type = other RNA
ggggttccagggcctgtctg

SEQ ID NO: 1264 - RNA, 20 nt, synthetic construct
  source 1..20: mol_type = other RNA
gacttgcacaacatgcagaa

SEQ ID NO: 1265 - RNA, 20 nt, synthetic construct
  source 1..20: mol_type = other RNA
ttgccagaagcaagatccca

SEQ ID NO: 1266 - RNA, 20 nt, synthetic construct
  source 1..20: mol_type = other RNA
ccatgaacaaccaaaagaga

SEQ ID NO: 1267 - RNA, 20 nt, synthetic construct
  source 1..20: mol_type = other RNA
tcacccccatccagaagccg

SEQ ID NO: 1268 - RNA, 20 nt, synthetic construct
  source 1..20: mol_type = other RNA
atctggctggtctcgtccag

SEQ ID NO: 1269 - RNA, 20 nt, synthetic construct
  source 1..20: mol_type = other RNA
gatgagcgacctcccggtga

SEQ ID NO: 1270 - RNA, 20 nt, synthetic construct
  source 1..20: mol_type = other RNA
agacagcgatgacgtctctg

SEQ ID NO: 1271 - RNA, 20 nt, synthetic construct
  source 1..20: mol_type = other RNA
acgtctctgaggtggacgcg

SEQ ID NO: 1272 - RNA, 20 nt, synthetic construct
  source 1..20: mol_type = other RNA
ttaggggagagtttctcggc

SEQ ID NO: 1273 - RNA, 20 nt, synthetic construct
  source 1..20: mol_type = other RNA
ggagagtgaggaggaggaag

SEQ ID NO: 1274 - RNA, 20 nt, synthetic construct
  source 1..20: mol_type = other RNA
aaggctccgaatccgaatct

SEQ ID NO: 1275 - RNA, 20 nt, synthetic construct
  source 1..20: mol_type = other RNA
atcgtcactcacgaccggct

SEQ ID NO: 1276 - RNA, 20 nt, synthetic construct
  source 1..20: mol_type = other RNA
tgacagtgaggaggaacaag

SEQ ID NO: 1277 - RNA, 20 nt, synthetic construct
  source 1..20: mol_type = other RNA
cacccgtggttgttacactc

SEQ ID NO: 1278 - RNA, 20 nt, synthetic construct
  source 1..20: mol_type = other RNA
catcagccaggccccgcagg

SEQ ID NO: 1279 - RNA, 20 nt, synthetic construct
  source 1..20: mol_type = other RNA
ggtgtatccatctgagttga

SEQ ID NO: 1280 - RNA, 20 nt, synthetic construct
  source 1..20: mol_type = other RNA
gggtgtatccatctgagttg

SEQ ID NO: 1281 - RNA, 20 nt, synthetic construct
  source 1..20: mol_type = other RNA
gcgcaagaagcagatcgacg

SEQ ID NO: 1282 - RNA, 20 nt, synthetic construct
  source 1..20: mol_type = other RNA
ttactacagcctggccagca

SEQ ID NO: 1283 - RNA, 20 nt, synthetic construct
  source 1..20: mol_type = other RNA
actcacccagcatccccagc

SEQ ID NO: 1284 - RNA, 20 nt, synthetic construct
  source 1..20: mol_type = other RNA
agcgactgcagaaagaagag

SEQ ID NO: 1285 - RNA, 20 nt, synthetic construct
  source 1..20: mol_type = other RNA
cataccagctgagccgtccg

SEQ ID NO: 1286 - RNA, 20 nt, synthetic construct
  source 1..20: mol_type = other RNA
tggaaatctgggggtcagaa

SEQ ID NO: 1287 - RNA, 20 nt, synthetic construct
  source 1..20: mol_type = other RNA
gttacccacctaagcaggtc

SEQ ID NO: 1288 - RNA, 20 nt, synthetic construct
  source 1..20: mol_type = other RNA
ctgccagcggctgaactgtg

SEQ ID NO: 1289 - RNA, 20 nt, synthetic construct
  source 1..20: mol_type = other RNA
cctcccactgcttggagctc

SEQ ID NO: 1290 - RNA, 20 nt, synthetic construct
  source 1..20: mol_type = other RNA
tctgccagcggctgaactgt

SEQ ID NO: 1291 - RNA, 20 nt, synthetic construct
  source 1..20: mol_type = other RNA
gtctgccagcggctgaactg

SEQ ID NO: 1292 - RNA, 20 nt, synthetic construct
  source 1..20: mol_type = other RNA
gaagtgccagggccagctgg

SEQ ID NO: 1293 - RNA, 20 nt, synthetic construct
  source 1..20: mol_type = other RNA
ccatgtgccatccgtccttg

SEQ ID NO: 1294 - RNA, 20 nt, synthetic construct
  source 1..20: mol_type = other RNA
tttgcagccagagctggggc

SEQ ID NO: 1295 - RNA, 20 nt, synthetic construct
  source 1..20: mol_type = other RNA
ggttctgcaatgagacactc

SEQ ID NO: 1296 - RNA, 20 nt, synthetic construct
  source 1..20: mol_type = other RNA
gagctaggagaggagagagc

SEQ ID NO: 1297 - RNA, 20 nt, synthetic construct
  source 1..20: mol_type = other RNA
tcacttacctgagcaaagga

SEQ ID NO: 1298 - RNA, 20 nt, synthetic construct
  source 1..20: mol_type = other RNA
ctcacttacctgagcaaagg

SEQ ID NO: 1299 - RNA, 20 nt, synthetic construct
  source 1..20: mol_type = other RNA
ctgcagctggtggcacagtc

SEQ ID NO: 1300 - RNA, 20 nt, synthetic construct
  source 1..20: mol_type = other RNA
cggccagcactgtgccggcg

SEQ ID NO: 1301 - RNA, 20 nt, synthetic construct
  source 1..20: mol_type = other RNA
atcttccattggattggcaa

SEQ ID NO: 1302 - RNA, 20 nt, synthetic construct
  source 1..20: mol_type = other RNA
gatcttccattggattggca

SEQ ID NO: 1303 - RNA, 20 nt, synthetic construct
  source 1..20: mol_type = other RNA
aacctgagaggggaagcaat

SEQ ID NO: 1304 - RNA, 20 nt, synthetic construct
  source 1..20: mol_type = other RNA
aaacctgagaggggaagcaa

SEQ ID NO: 1305 - RNA, 20 nt, synthetic construct
  source 1..20: mol_type = other RNA
gtgcagagccgtctggtggg

SEQ ID NO: 1306 - RNA, 20 nt, synthetic construct
  source 1..20: mol_type = other RNA
ctcccaccgcagcgagctcc

SEQ ID NO: 1307 - RNA, 20 nt, synthetic construct
  source 1..20: mol_type = other RNA
ctcccaaagttcgtggcact

SEQ ID NO: 1308 - RNA, 20 nt, synthetic construct
  source 1..20: mol_type = other RNA
aggtgcagagccgtctggtg

SEQ ID NO: 1309 - RNA, 20 nt, synthetic construct
  source 1..20: mol_type = other RNA
ggtgcagagccgtctggtgg

SEQ ID NO: 1310 - RNA, 20 nt, synthetic construct
  source 1..20: mol_type = other RNA
tctcccaaagttcgtggcac

SEQ ID NO: 1311 - RNA, 20 nt, synthetic construct
  source 1..20: mol_type = other RNA
tgtcccagtgccacgaactt

SEQ ID NO: 1312 - RNA, 20 nt, synthetic construct
  source 1..20: mol_type = other RNA
aaggtgcagagccgtctggt

SEQ ID NO: 1313 - RNA, 20 nt, synthetic construct
  source 1..20: mol_type = other RNA
tcctatcgagtgctggacgc

SEQ ID NO: 1314 - RNA, 20 nt, synthetic construct
  source 1..20: mol_type = other RNA
caaggtgcagagccgtctgg

SEQ ID NO: 1315 - RNA, 20 nt, synthetic construct
  source 1..20: mol_type = other RNA
ggtgcgccagggggctcagt

SEQ ID NO: 1316 - RNA, 20 nt, synthetic construct
  source 1..20: mol_type = other RNA
gggctgcccactgagccccc

SEQ ID NO: 1317 - RNA, 20 nt, synthetic construct
  source 1..20: mol_type = other RNA
aggtgcgccagggggctcag

SEQ ID NO: 1318 - RNA, 20 nt, synthetic construct
  source 1..20: mol_type = other RNA
ggccaggatccaaaccccgc

SEQ ID NO: 1319 - RNA, 20 nt, synthetic construct
  source 1..20: mol_type = other RNA
cgccagtggattggcccaac

SEQ ID NO: 1320 - RNA, 20 nt, synthetic construct
  source 1..20: mol_type = other RNA
aagaagcagcgccagtggat

SEQ ID NO: 1321 - RNA, 20 nt, synthetic construct
  source 1..20: mol_type = other RNA
aaagacactgggcagatggt

SEQ ID NO: 1322 - RNA, 20 nt, synthetic construct
  source 1..20: mol_type = other RNA
gcttacctggataagctgac

SEQ ID NO: 1323 - RNA, 20 nt, synthetic construct
  source 1..20: mol_type = other RNA
ttccagagctggggaaagaa

SEQ ID NO: 1324 - RNA, 20 nt, synthetic construct
  source 1..20: mol_type = other RNA
atggggctcagaggctgtaa

SEQ ID NO: 1325 - RNA, 20 nt, synthetic construct
  source 1..20: mol_type = other RNA
cttgggtcaggacatcaact

SEQ ID NO: 1326 - RNA, 20 nt, synthetic construct
  source 1..20: mol_type = other RNA
cgatgatcaggatatctaca

SEQ ID NO: 1327 - RNA, 20 nt, synthetic construct
  source 1..20: mol_type = other RNA
cacgcacctggacagctgac

SEQ ID NO: 1328 - RNA, 20 nt, synthetic construct
  source 1..20: mol_type = other RNA
aaacagaggagtcggagaaa

SEQ ID NO: 1329 - RNA, 20 nt, synthetic construct
  source 1..20: mol_type = other RNA
acacaagttcaccagcagaa

SEQ ID NO: 1330 - RNA, 20 nt, synthetic construct
  source 1..20: mol_type = other RNA
gttcagccaaaacctcccca

SEQ ID NO: 1331 - RNA, 20 nt, synthetic construct
  source 1..20: mol_type = other RNA
atacaagtccaggagatctt

SEQ ID NO: 1332 - RNA, 20 nt, synthetic construct
  source 1..20: mol_type = other RNA
ttcagcaccagcctcagaag

SEQ ID NO: 1333 - RNA, 20 nt, synthetic construct
  source 1..20: mol_type = other RNA
ggagtctgagagatggagag

SEQ ID NO: 1334 - RNA, 20 nt, synthetic construct
  source 1..20: mol_type = other RNA
ttctctctggaagggcacaa

SEQ ID NO: 1335 - RNA, 20 nt, synthetic construct
  source 1..20: mol_type = other RNA
gacgttacctcgtgcggccc

SEQ ID NO: 1336 - RNA, 20 nt, synthetic construct
  source 1..20: mol_type = other RNA
cctgcagagaaacacacttg

SEQ ID NO: 1337 - RNA, 20 nt, synthetic construct
  source 1..20: mol_type = other RNA
cagttccaaaccctggtggt

SEQ ID NO: 1338 - RNA, 20 nt, synthetic construct
  source 1..20: mol_type = other RNA
ggacccagactagcagcacc

SEQ ID NO: 1339 - RNA, 20 nt, synthetic construct
  source 1..20: mol_type = other RNA
cttacctgggctggggaaga

SEQ ID NO: 1340 - RNA, 20 nt, synthetic construct
  source 1..20: mol_type = other RNA
ttcgtatctgtaaaaccaag

SEQ ID NO: 1341 - RNA, 20 nt, synthetic construct
  source 1..20: mol_type = other RNA
tttcaaaacctgtcagtgat

SEQ ID NO: 1342 - RNA, 20 nt, synthetic construct
  source 1..20: mol_type = other RNA
ttcaaaacctgtcagtgatt

SEQ ID NO: 1343 - RNA, 20 nt, synthetic construct
  source 1..20: mol_type = other RNA
ccatcggctcgcggcgagaa

SEQ ID NO: 1344 - RNA, 20 nt, synthetic construct
  source 1..20: mol_type = other RNA
cctgtctgggagagagaagc

SEQ ID NO: 1345 - RNA, 20 nt, synthetic construct
  source 1..20: mol_type = other RNA
gctcacctggctgagcagcc

SEQ ID NO: 1346 - RNA, 20 nt, synthetic construct
  source 1..20: mol_type = other RNA
ctcacctggctgagcagcca

SEQ ID NO: 1347 - RNA, 20 nt, synthetic construct
  source 1..20: mol_type = other RNA
accaagttctggaacaaaag

SEQ ID NO: 1348 - RNA, 20 nt, synthetic construct
  source 1..20: mol_type = other RNA
gccaacctacagaaaaattg

SEQ ID NO: 1349 - RNA, 20 nt, synthetic construct
  source 1..20: mol_type = other RNA
ccaacctacagaaaaattga

SEQ ID NO: 1350 - RNA, 20 nt, synthetic construct
  source 1..20: mol_type = other RNA
agccttgcaggtgaagagac

SEQ ID NO: 1351 - RNA, 20 nt, synthetic construct
  source 1..20: mol_type = other RNA
ctcaactctttcttgtcttc

SEQ ID NO: 1352 - RNA, 20 nt, synthetic construct
  source 1..20: mol_type = other RNA
tcaactctttcttgtcttca

SEQ ID NO: 1353 - RNA, 20 nt, synthetic construct
  source 1..20: mol_type = other RNA
cactacttcaaggggagcag

SEQ ID NO: 1354 - RNA, 20 nt, synthetic construct
  source 1..20: mol_type = other RNA
acctaccgatgtgctcccgc

SEQ ID NO: 1355 - RNA, 20 nt, synthetic construct
  source 1..20: mol_type = other RNA
ctggcgtctggggtgagata

SEQ ID NO: 1356 - RNA, 20 nt, synthetic construct
  source 1..20: mol_type = other RNA
gagttaccttgtggcatggc

SEQ ID NO: 1357 - RNA, 20 nt, synthetic construct
  source 1..20: mol_type = other RNA
atcctaccttgcagggatct

SEQ ID NO: 1358 - RNA, 20 nt, synthetic construct
  source 1..20: mol_type = other RNA
tcacgtgaaagggtagacca

SEQ ID NO: 1359 - RNA, 20 nt, synthetic construct
  source 1..20: mol_type = other RNA
atctacctgggcatagttca

SEQ ID NO: 1360 - RNA, 20 nt, synthetic construct
  source 1..20: mol_type = other RNA
tgattacctgtccccaccaa

SEQ ID NO: 1361 - RNA, 20 nt, synthetic construct
  source 1..20: mol_type = other RNA
ccccaatctgccaaggaatg

SEQ ID NO: 1362 - RNA, 20 nt, synthetic construct
  source 1..20: mol_type = other RNA
ccatacctcagaggagaaca

SEQ ID NO: 1363 - RNA, 20 nt, synthetic construct
  source 1..20: mol_type = other RNA
caagctcctgggcagagatg

SEQ ID NO: 1364 - RNA, 20 nt, synthetic construct
  source 1..20: mol_type = other RNA
ttatctagaaatgaacccaa

SEQ ID NO: 1365 - RNA, 20 nt, synthetic construct
  source 1..20: mol_type = other RNA
tgggcatggccacagacgac

SEQ ID NO: 1366 - RNA, 20 nt, synthetic construct
  source 1..20: mol_type = other RNA
ctgctcaccggagcgggatg

SEQ ID NO: 1367 - RNA, 20 nt, synthetic construct
  source 1..20: mol_type = other RNA
cagttgttccaacctagcat

SEQ ID NO: 1368 - RNA, 20 nt, synthetic construct
  source 1..20: mol_type = other RNA
cactcccagggctgcgggga

SEQ ID NO: 1369 - RNA, 20 nt, synthetic construct
  source 1..20: mol_type = other RNA
ccactcccagggctgcgggg

SEQ ID NO: 1370 - RNA, 20 nt, synthetic construct
  source 1..20: mol_type = other RNA
gcgacgacagctgaagcaga

SEQ ID NO: 1371 - RNA, 20 nt, synthetic construct
  source 1..20: mol_type = other RNA
ggagagccagcctctgccgg

SEQ ID NO: 1372 - RNA, 20 nt, synthetic construct
  source 1..20: mol_type = other RNA
acatgagccagagaggggcg

SEQ ID NO: 1373 - RNA, 20 nt, synthetic construct
  source 1..20: mol_type = other RNA
gaggcagcaagaacctttca

SEQ ID NO: 1374 - RNA, 20 nt, synthetic construct
  source 1..20: mol_type = other RNA
tggcccacactcctggcggg

SEQ ID NO: 1375 - RNA, 20 nt, synthetic construct
  source 1..20: mol_type = other RNA
cgttggcccacactcctggc

SEQ ID NO: 1376 - RNA, 20 nt, synthetic construct
  source 1..20: mol_type = other RNA
ctgggactcttgggcactcc

SEQ ID NO: 1377 - RNA, 20 nt, synthetic construct
  source 1..20: mol_type = other RNA
tgcgtgcctggaggggagat

SEQ ID NO: 1378 - RNA, 20 nt, synthetic construct
  source 1..20: mol_type = other RNA
ctgcgtgcctggaggggaga

SEQ ID NO: 1379 - RNA, 20 nt, synthetic construct
  source 1..20: mol_type = other RNA
ggtgattctgacagggcaag

SEQ ID NO: 1380 - RNA, 20 nt, synthetic construct
  source 1..20: mol_type = other RNA
aagcctagcggggtgggcag

SEQ ID NO: 1381 - RNA, 20 nt, synthetic construct
  source 1..20: mol_type = other RNA
cggactcacctggaacatgc

SEQ ID NO: 1382 - RNA, 20 nt, synthetic construct
  source 1..20: mol_type = other RNA
agccctagggagtcatatga

SEQ ID NO: 1383 - RNA, 20 nt, synthetic construct
  source 1..20: mol_type = other RNA
cagccctagggagtcatatg

SEQ ID NO: 1384 - RNA, 20 nt, synthetic construct
  source 1..20: mol_type = other RNA
tctcacctgcagggtgcagt

SEQ ID NO: 1385 - RNA, 20 nt, synthetic construct
  source 1..20: mol_type = other RNA
gtctcacctgcagggtgcag

SEQ ID NO: 1386 - RNA, 20 nt, synthetic construct
  source 1..20: mol_type = other RNA
cacagcctgaggagaggcaa

SEQ ID NO: 1387 - RNA, 20 nt, synthetic construct
  source 1..20: mol_type = other RNA
gcacagcctgaggagaggca

SEQ ID NO: 1388 - RNA, 20 nt, synthetic construct
  source 1..20: mol_type = other RNA
gcactggaggacagggaaga

SEQ ID NO: 1389 - RNA, 20 nt, synthetic construct
  source 1..20: mol_type = other RNA
ggcactggaggacagggaag

SEQ ID NO: 1390 - RNA, 20 nt, synthetic construct
  source 1..20: mol_type = other RNA
cacccacctctggggtgtcc

SEQ ID NO: 1391 - RNA, 20 nt, synthetic construct
  source 1..20: mol_type = other RNA
gcacctaggaggtccagaag

SEQ ID NO: 1392 - RNA, 20 nt, synthetic construct
  source 1..20: mol_type = other RNA
cccttacccagctggtggac

SEQ ID NO: 1393 - RNA, 20 nt, synthetic construct
  source 1..20: mol_type = other RNA
cttcactatcagggggtatg

SEQ ID NO: 1394 - RNA, 20 nt, synthetic construct
  source 1..20: mol_type = other RNA
tcacttacaggtagcttcag

SEQ ID NO: 1395 - RNA, 20 nt, synthetic construct
  source 1..20: mol_type = other RNA
gttcactgcatgcaaggttg

SEQ ID NO: 1396 - RNA, 20 nt, synthetic construct
  source 1..20: mol_type = other RNA
tgttcactgcatgcaaggtt

SEQ ID NO: 1397 - RNA, 20 nt, synthetic construct
  source 1..20: mol_type = other RNA
ctgttcactgcatgcaaggt

SEQ ID NO: 1398 - RNA, 20 nt, synthetic construct
  source 1..20: mol_type = other RNA
ctctcctgtggggggccaga

SEQ ID NO: 1399 - RNA, 20 nt, synthetic construct
  source 1..20: mol_type = other RNA
actctcctgtggggggccag

SEQ ID NO: 1400 - RNA, 20 nt, synthetic construct
  source 1..20: mol_type = other RNA
gcaacttgagggagagagaa

SEQ ID NO: 1401 - RNA, 20 nt, synthetic construct
  source 1..20: mol_type = other RNA
aggtactggggagccaaggc

SEQ ID NO: 1402 - RNA, 20 nt, synthetic construct
  source 1..20: mol_type = other RNA
acctaccacatcgctcttgc

SEQ ID NO: 1403 - RNA, 20 nt, synthetic construct
  source 1..20: mol_type = other RNA
ggaccactgtgaggggcaga

SEQ ID NO: 1404 - RNA, 20 nt, synthetic construct
  source 1..20: mol_type = other RNA
aggaccactgtgaggggcag

SEQ ID NO: 1405 - RNA, 20 nt, synthetic construct
  source 1..20: mol_type = other RNA
atacctagggcagcaaaatg

SEQ ID NO: 1406 - RNA, 20 nt, synthetic construct
  source 1..20: mol_type = other RNA
gaggcatggctgaaatcttc

SEQ ID NO: 1407 - RNA, 20 nt, synthetic construct
  source 1..20: mol_type = other RNA
tctacctgtttgccaggggg

SEQ ID NO: 1408 - RNA, 20 nt, synthetic construct
  source 1..20: mol_type = other RNA
gactctacctgtttgccagg

SEQ ID NO: 1409 - RNA, 20 nt, synthetic construct
  source 1..20: mol_type = other RNA
agtcctgggaagcagagacg

SEQ ID NO: 1410 - RNA, 20 nt, synthetic construct
  source 1..20: mol_type = other RNA
gagtcctgggaagcagagac

SEQ ID NO: 1411 - RNA, 20 nt, synthetic construct
  source 1..20: mol_type = other RNA
tgagtcctgggaagcagaga

SEQ ID NO: 1412 - RNA, 20 nt, synthetic construct
  source 1..20: mol_type = other RNA
acttaccaggtgcagggtgt

SEQ ID NO: 1413 - RNA, 19 nt, synthetic construct
  source 1..19: mol_type = other RNA
ggtagacaattgcagcctg

SEQ ID NO: 1414 - RNA, 20 nt, synthetic construct
  source 1..20: mol_type = other RNA
gcctccccagctcagacctg

SEQ ID NO: 1415 - RNA, 20 nt, synthetic construct
  source 1..20: mol_type = other RNA
tccctacagacagagccaca

SEQ ID NO: 1416 - RNA, 20 nt, synthetic construct
  source 1..20: mol_type = other RNA
gagccacaaggtaatcctga

SEQ ID NO: 1417 - RNA, 20 nt, synthetic construct
  source 1..20: mol_type = other RNA
gcccaagagttgcggcgtat

SEQ ID NO: 1418 - RNA, 20 nt, synthetic construct
  source 1..20: mol_type = other RNA
aaaatacctgaaacaacaaa

SEQ ID NO: 1419 - RNA, 20 nt, synthetic construct
  source 1..20: mol_type = other RNA
caatgactgcaaagatacaa

SEQ ID NO: 1420 - RNA, 20 nt, synthetic construct
  source 1..20: mol_type = other RNA
acaatgactgcaaagataca

SEQ ID NO: 1421 - RNA, 20 nt, synthetic construct
  source 1..20: mol_type = other RNA
aatgactgcatgcaaacacc

SEQ ID NO: 1422 - RNA, 20 nt, synthetic construct
  source 1..20: mol_type = other RNA
atgactgcatgcaaacacca

SEQ ID NO: 1423 - RNA, 20 nt, synthetic construct
  source 1..20: mol_type = other RNA
tgactgcatgcaaacaccag

SEQ ID NO: 1424 - RNA, 20 nt, synthetic construct
  source 1..20: mol_type = other RNA
tactcaccttcaggtcccga

SEQ ID NO: 1425 - RNA, 20 nt, synthetic construct
  source 1..20: mol_type = other RNA
actcaccaaaccacgcctgc

SEQ ID NO: 1426 - RNA, 20 nt, synthetic construct
  source 1..20: mol_type = other RNA
taacttacctttactccatc

SEQ ID NO: 1427 - RNA, 20 nt, synthetic construct
  source 1..20: mol_type = other RNA
aggtataccagcgctggggt

SEQ ID NO: 1428 - RNA, 20 nt, synthetic construct
  source 1..20: mol_type = other RNA
tgaataccttgtttccatca

SEQ ID NO: 1429 - RNA, 20 nt, synthetic construct
  source 1..20: mol_type = other RNA
ctgaataccttgtttccatc

SEQ ID NO: 1430 - RNA, 20 nt, synthetic construct
  source 1..20: mol_type = other RNA
tcgtgctaaaggcaaaaata

SEQ ID NO: 1431 - RNA, 20 nt, synthetic construct
  source 1..20: mol_type = other RNA
agctcaccatcgtgggcctg

SEQ ID NO: 1432 - RNA, 20 nt, synthetic construct
  source 1..20: mol_type = other RNA
aagctcaccatcgtgggcct

SEQ ID NO: 1433 - RNA, 20 nt, synthetic construct
  source 1..20: mol_type = other RNA
aaagctcaccatcgtgggcc

SEQ ID NO: 1434 - RNA, 20 nt, synthetic construct
  source 1..20: mol_type = other RNA
atcctagtcagaggaggaaa

SEQ ID NO: 1435 - RNA, 20 nt, synthetic construct
  source 1..20: mol_type = other RNA
gttatcctggggttgtgtac

SEQ ID NO: 1436 - RNA, 20 nt, synthetic construct
  source 1..20: mol_type = other RNA
gaaccttcaaaggaccaaga

SEQ ID NO: 1437 - RNA, 20 nt, synthetic construct
  source 1..20: mol_type = other RNA
tcacccgctccaccctttcc

SEQ ID NO: 1438 - RNA, 20 nt, synthetic construct
  source 1..20: mol_type = other RNA
ataatctaagtcaaaataaa

SEQ ID NO: 1439 - RNA, 20 nt, synthetic construct
  source 1..20: mol_type = other RNA
agtccatctttttaaaaggc

SEQ ID NO: 1440 - RNA, 20 nt, synthetic construct
  source 1..20: mol_type = other RNA
catgaccctgtggtgggaaa

SEQ ID NO: 1441 - RNA, 20 nt, synthetic construct
  source 1..20: mol_type = other RNA
ttaccatttgaaaattcatc

SEQ ID NO: 1442 - RNA, 20 nt, synthetic construct
  source 1..20: mol_type = other RNA
catacagtcagtatcaattc

SEQ ID NO: 1443 - RNA, 20 nt, synthetic construct
  source 1..20: mol_type = other RNA
ggtgtcgaaatgagaagaag

SEQ ID NO: 1444 - RNA, 20 nt, synthetic construct
  source 1..20: mol_type = other RNA
atgcaggtgacagagactct

SEQ ID NO: 1445 - RNA, 20 nt, synthetic construct
  source 1..20: mol_type = other RNA
tggggagcaggaaatatctg

SEQ ID NO: 1446 - RNA, 20 nt, synthetic construct
  source 1..20: mol_type = other RNA
tctcaaaaccaaagatctcc

SEQ ID NO: 1447 - RNA, 20 nt, synthetic construct
  source 1..20: mol_type = other RNA
caacacaaccctgacctgtg

SEQ ID NO: 1448 - RNA, 20 nt, synthetic construct
  source 1..20: mol_type = other RNA
tcaccaaaaggaaaaaacag

SEQ ID NO: 1449 - RNA, 20 nt, synthetic construct
  source 1..20: mol_type = other RNA
agccttaccttgcgagagaa

SEQ ID NO: 1450 - RNA, 20 nt, synthetic construct
  source 1..20: mol_type = other RNA
tagccttaccttgcgagaga

SEQ ID NO: 1451 - RNA, 20 nt, synthetic construct
  source 1..20: mol_type = other RNA
tcgcaaggtaaggctactcc

SEQ ID NO: 1452 - RNA, 20 nt, synthetic construct
  source 1..20: mol_type = other RNA
ggcacactgtgggggaaggg

SEQ ID NO: 1453 - RNA, 20 nt, synthetic construct
  source 1..20: mol_type = other RNA
gtgccagagctgtgtggagc

SEQ ID NO: 1454 - RNA, 20 nt, synthetic construct
  source 1..20: mol_type = other RNA
ccgacacacaagctctgttg

SEQ ID NO: 1455 - RNA, 20 nt, synthetic construct
  source 1..20: mol_type = other RNA
ggtctatcaggtgagcgttg

SEQ ID NO: 1456 - RNA, 20 nt, synthetic construct
  source 1..20: mol_type = other RNA
gatgctcagtacagccacct

SEQ ID NO: 1457 - RNA, 20 nt, synthetic construct
  source 1..20: mol_type = other RNA
ccgactgcatctttgtttca

SEQ ID NO: 1458 - RNA, 20 nt, synthetic construct
  source 1..20: mol_type = other RNA
actcacctgataagaggcag

SEQ ID NO: 1459 - RNA, 20 nt, synthetic construct
  source 1..20: mol_type = other RNA
taccacctgaaaatgaaaaa

SEQ ID NO: 1460 - RNA, 20 nt, synthetic construct
  source 1..20: mol_type = other RNA
acacagacacgtgagtttat

SEQ ID NO: 1461 - RNA, 20 nt, synthetic construct
  source 1..20: mol_type = other RNA
tatatgctggggagaaagaa

SEQ ID NO: 1462 - RNA, 20 nt, synthetic construct
  source 1..20: mol_type = other RNA
ttatatgctggggagaaaga

SEQ ID NO: 1463 - RNA, 20 nt, synthetic construct
  source 1..20: mol_type = other RNA
ctggattacctcttgccctc

SEQ ID NO: 1464 - RNA, 20 nt, synthetic construct
  source 1..20: mol_type = other RNA
acactgtggggggtggggtg

SEQ ID NO: 1465 - RNA, 20 nt, synthetic construct
  source 1..20: mol_type = other RNA
cacactgtggggggtggggt

SEQ ID NO: 1466 - RNA, 20 nt, synthetic construct
  source 1..20: mol_type = other RNA
acacactgtggggggtgggg

SEQ ID NO: 1467 - RNA, 20 nt, synthetic construct
  source 1..20: mol_type = other RNA
ttgtcctgcggaggaaggag

SEQ ID NO: 1468 - RNA, 20 nt, synthetic construct
  source 1..20: mol_type = other RNA
tttgtcctgcggaggaagga

SEQ ID NO: 1469 - RNA, 20 nt, synthetic construct
  source 1..20: mol_type = other RNA
ttttgtcctgcggaggaagg

SEQ ID NO: 1470 - RNA, 20 nt, synthetic construct
  source 1..20: mol_type = other RNA
gttacctcatagtctgggtt

SEQ ID NO: 1471 - RNA, 20 nt, synthetic construct
  source 1..20: mol_type = other RNA
cgttacctcatagtctgggt

SEQ ID NO: 1472 - RNA, 20 nt, synthetic construct
  source 1..20: mol_type = other RNA
catggaacaggggaagggcc

SEQ ID NO: 1473 - RNA, 20 nt, synthetic construct
  source 1..20: mol_type = other RNA
cttcaaggtaagggcctact

SEQ ID NO: 1474 - RNA, 20 nt, synthetic construct
  source 1..20: mol_type = other RNA
tctcctacctttgattgact

SEQ ID NO: 1475 - RNA, 20 nt, synthetic construct
  source 1..20: mol_type = other RNA
ttctcctacctttgattgac

SEQ ID NO: 1476 - RNA, 20 nt, synthetic construct
  source 1..20: mol_type = other RNA
tggcccagtcaatcaaaggt

SEQ ID NO: 1477 - RNA, 20 nt, synthetic construct
  source 1..20: mol_type = other RNA
acatacttctgtaatacact

SEQ ID NO: 1478 - RNA, 20 nt, synthetic construct
  source 1..20: mol_type = other RNA
tgactatcaagaagatggtt

SEQ ID NO: 1479 - RNA, 20 nt, synthetic construct
  source 1..20: mol_type = other RNA
tttaaaccatgtgatatttt

SEQ ID NO: 1480 - RNA, 20 nt, synthetic construct
  source 1..20: mol_type = other RNA
ctcttccattgggtacataa

SEQ ID NO: 1481 - RNA, 20 nt, synthetic construct
  source 1..20: mol_type = other RNA
tgaccagctctaccaggtaa

SEQ ID NO: 1482 - RNA, 20 nt, synthetic construct
  source 1..20: mol_type = other RNA
gaccagtacagccaccttca

SEQ ID NO: 1483 - RNA, 20 nt, synthetic construct
  source 1..20: mol_type = other RNA
accttcaaggaaaccagttg

SEQ ID NO: 1484 - RNA, 20 nt, synthetic construct
  source 1..20: mol_type = other RNA
ggttcattgtggccttgccg

SEQ ID NO: 1485 - RNA, 20 nt, synthetic construct
  source 1..20: mol_type = other RNA
gagcgctaagtggaaaagaa

SEQ ID NO: 1486 - RNA, 20 nt, synthetic construct
  source 1..20: mol_type = other RNA
aaccctacctttagttaaga

SEQ ID NO: 1487 - RNA, 20 nt, synthetic construct
  source 1..20: mol_type = other RNA
ggcagtcactgtggagggaa

SEQ ID NO: 1488 - RNA, 20 nt, synthetic construct
  source 1..20: mol_type = other RNA
tggaaagctggaggtgggaa

SEQ ID NO: 1489 - RNA, 20 nt, synthetic construct
  source 1..20: mol_type = other RNA
cctcacctctcatcaccacc

SEQ ID NO: 1490 - RNA, 20 nt, synthetic construct
  source 1..20: mol_type = other RNA
agtggctgcagaggaacgag

SEQ ID NO: 1491 - RNA, 20 nt, synthetic construct
  source 1..20: mol_type = other RNA
gcgctgtccagggacaagaa

SEQ ID NO: 1492 - RNA, 20 nt, synthetic construct
  source 1..20: mol_type = other RNA
tccttactgaggacactggc

SEQ ID NO: 1493 - RNA, 20 nt, synthetic construct
  source 1..20: mol_type = other RNA
ccatctggagcttagggtcc

SEQ ID NO: 1494 - RNA, 20 nt, synthetic construct
  source 1..20: mol_type = other RNA
ggttggcatgtggaggcagc

SEQ ID NO: 1495 - RNA, 20 nt, synthetic construct
  source 1..20: mol_type = other RNA
gggtcataccagctgagccg

SEQ ID NO: 1496 - RNA, 20 nt, synthetic construct
  source 1..20: mol_type = other RNA
ctccagagcccacaggtaag

SEQ ID NO: 1497 - RNA, 20 nt, synthetic construct
  source 1..20: mol_type = other RNA
accacaactccagagcccac

SEQ ID NO: 1498 - RNA, 20 nt, synthetic construct
  source 1..20: mol_type = other RNA
tgaggcccaggacaagaccc

SEQ ID NO: 1499 - RNA, 20 nt, synthetic construct
  source 1..20: mol_type = other RNA
tttccagcccaaggtgcaga

SEQ ID NO: 1500 - RNA, 20 nt, synthetic construct
  source 1..20: mol_type = other RNA
gcgccagtggattggcccaa

SEQ ID NO: 1501 - RNA, 20 nt, synthetic construct
  source 1..20: mol_type = other RNA
aaggccatgacgcgctcccc

SEQ ID NO: 1502 - RNA, 20 nt, synthetic construct
  source 1..20: mol_type = other RNA
tcacggagcagcaaggccag

SEQ ID NO: 1503 - RNA, 20 nt, synthetic construct
  source 1..20: mol_type = other RNA
cgcggacctggcaggaagac

SEQ ID NO: 1504 - RNA, 20 nt, synthetic construct
  source 1..20: mol_type = other RNA
tcacctgcgccccccgccgc

SEQ ID NO: 1505 - RNA, 20 nt, synthetic construct
  source 1..20: mol_type = other RNA
cttactgtggttgcagtaaa

SEQ ID NO: 1506 - RNA, 20 nt, synthetic construct
  source 1..20: mol_type = other RNA
acttactgtggttgcagtaa

SEQ ID NO: 1507 - RNA, 20 nt, synthetic construct
  source 1..20: mol_type = other RNA
ttggccatagggctccaggc

SEQ ID NO: 1508 - RNA, 20 nt, synthetic construct
  source 1..20: mol_type = other RNA
gttggccatagggctccagg

SEQ ID NO: 1509 - RNA, 20 nt, synthetic construct
  source 1..20: mol_type = other RNA
gcgccagcagtggagcggtc

SEQ ID NO: 1510 - RNA, 20 nt, synthetic construct
  source 1..20: mol_type = other RNA
aattaccttgttgcaaggta

SEQ ID NO: 1511 - RNA, 20 nt, synthetic construct
  source 1..20: mol_type = other RNA
ctatcagccactaatgaagt

SEQ ID NO: 1512 - RNA, 20 nt, synthetic construct
  source 1..20: mol_type = other RNA
ctgctccaaagaagaatcta

SEQ ID NO: 1513 - RNA, 20 nt, synthetic construct
  source 1..20: mol_type = other RNA
actatcaatcttgcccagac

SEQ ID NO: 1514 - RNA, 20 nt, synthetic construct
  source 1..20: mol_type = other RNA
ttttccagaatactgaaaca

SEQ ID NO: 1515 - RNA, 20 nt, synthetic construct
  source 1..20: mol_type = other RNA
gttttccagaatactgaaac

SEQ ID NO: 1516 - RNA, 20 nt, synthetic construct
  source 1..20: mol_type = other RNA
ttacctgtagatattcttgc

SEQ ID NO: 1517 - RNA, 20 nt, synthetic construct
  source 1..20: mol_type = other RNA
ctcaccccaagtgactcgag

SEQ ID NO: 1518 - RNA, 20 nt, synthetic construct
  source 1..20: mol_type = other RNA
gtgcatccagcgcttcgcac

SEQ ID NO: 1519 - RNA, 20 nt, synthetic construct
  source 1..20: mol_type = other RNA
gagctgcagctgaatcacac

SEQ ID NO: 1520 - RNA, 20 nt, synthetic construct
  source 1..20: mol_type = other RNA
ctggcaggggggcccagcac

SEQ ID NO: 1521 - RNA, 20 nt, synthetic construct
  source 1..20: mol_type = other RNA
ctcccagcgcctgacgcccc

SEQ ID NO: 1522 - RNA, 20 nt, synthetic construct
  source 1..20: mol_type = other RNA
ccccctgccagtatagcctg

SEQ ID NO: 1523 - RNA, 20 nt, synthetic construct
  source 1..20: mol_type = other RNA
cccccctgccagtatagcct

SEQ ID NO: 1524 - RNA, 20 nt, synthetic construct
  source 1..20: mol_type = other RNA
tgagcccatcccgccagtcc

SEQ ID NO: 1525 - RNA, 20 nt, synthetic construct
  source 1..20: mol_type = other RNA
tcaccagccccagcaggcag

SEQ ID NO: 1526 - RNA, 20 nt, synthetic construct
  source 1..20: mol_type = other RNA
aagtactggggacacagagc

SEQ ID NO: 1527 - RNA, 20 nt, synthetic construct
  source 1..20: mol_type = other RNA
acttcacctgggcaaggcag

SEQ ID NO: 1528 - RNA, 20 nt, synthetic construct
  source 1..20: mol_type = other RNA
cacttcacctgggcaaggca

SEQ ID NO: 1529 - RNA, 20 nt, synthetic construct
  source 1..20: mol_type = other RNA
ccgcacacctcctggtacac

SEQ ID NO: 1530 - RNA, 20 nt, synthetic construct
  source 1..20: mol_type = other RNA
agccctgcaagggcagaatg

SEQ ID NO: 1531 - RNA, 20 nt, synthetic construct
  source 1..20: mol_type = other RNA
ccaggagctgtggggagagg

SEQ ID NO: 1532 - RNA, 20 nt, synthetic construct
  source 1..20: mol_type = other RNA
gttcttaccagagagcagga

SEQ ID NO: 1533 - RNA, 20 nt, synthetic construct
  source 1..20: mol_type = other RNA
gcacctaaaaaagaaggtta

SEQ ID NO: 1534 - RNA, 20 nt, synthetic construct
  source 1..20: mol_type = other RNA
ttggcaggaccaggaaaact

SEQ ID NO: 1535 - RNA, 20 nt, synthetic construct
  source 1..20: mol_type = other RNA
caatcttcagatcaaggaca

SEQ ID NO: 1536 - RNA, 20 nt, synthetic construct
  source 1..20: mol_type = other RNA
gtaatccaaggaatgtggtc

SEQ ID NO: 1537 - RNA, 20 nt, synthetic construct
  source 1..20: mol_type = other RNA
agagtgaacagaccaagaaa

SEQ ID NO: 1538 - RNA, 20 nt, synthetic construct
  source 1..20: mol_type = other RNA
ggacatccagtctggtggtg

SEQ ID NO: 1539 - RNA, 20 nt, synthetic construct
  source 1..20: mol_type = other RNA
aatgcatcctggaatggaaa

SEQ ID NO: 1540 - RNA, 20 nt, synthetic construct
  source 1..20: mol_type = other RNA
gcactcacctgtgaatagaa

SEQ ID NO: 1541 - RNA, 20 nt, synthetic construct
  source 1..20: mol_type = other RNA
taaaacagctgagacttaaa

SEQ ID NO: 1542 - RNA, 20 nt, synthetic construct
  source 1..20: mol_type = other RNA
gcttcctacaagaaaaggtc

SEQ ID NO: 1543 - RNA, 20 nt, synthetic construct
  source 1..20: mol_type = other RNA
ttacccagaccttttcttgt

SEQ ID NO: 1544 - RNA, 20 nt, synthetic construct
  source 1..20: mol_type = other RNA
cagcatttccacaggacaga

SEQ ID NO: 1545 - RNA, 20 nt, synthetic construct
  source 1..20: mol_type = other RNA
ccagcatttccacaggacag

SEQ ID NO: 1546 - RNA, 20 nt, synthetic construct
  source 1..20: mol_type = other RNA
acttaccaaatacaaaaacc

SEQ ID NO: 1547 - RNA, 20 nt, synthetic construct
  source 1..20: mol_type = other RNA
gattctgatcagaaaggcat

SEQ ID NO: 1548 - RNA, 20 nt, synthetic construct
  source 1..20: mol_type = other RNA
tgaattctgaggaatacaga

SEQ ID NO: 1549 - RNA, 20 nt, synthetic construct
  source 1..20: mol_type = other RNA
atgacatacgtgatttctcc

SEQ ID NO: 1550 - RNA, 20 nt, synthetic construct
  source 1..20: mol_type = other RNA
tcctgctcctgcacaagaaa

SEQ ID NO: 1551 - RNA, 20 nt, synthetic construct
  source 1..20: mol_type = other RNA
tcaccctaggagcaaaacaa

SEQ ID NO: 1552 - RNA, 20 nt, synthetic construct
  source 1..20: mol_type = other RNA
cgcagcatcttcctgtgagg

SEQ ID NO: 1553 - RNA, 20 nt, synthetic construct
  source 1..20: mol_type = other RNA
gctcctgggggtagggggag

SEQ ID NO: 1554 - RNA, 20 nt, synthetic construct
  source 1..20: mol_type = other RNA
ggtgctcaccggccacctgc

SEQ ID NO: 1555 - RNA, 20 nt, synthetic construct
  source 1..20: mol_type = other RNA
agggagctggaggtgacaga

SEQ ID NO: 1556 - RNA, 20 nt, synthetic construct
  source 1..20: mol_type = other RNA
tagggagctggaggtgacag

SEQ ID NO: 1557 - RNA, 20 nt, synthetic construct
  source 1..20: mol_type = other RNA
gcaacctgtggggcttctct

SEQ ID NO: 1558 - RNA, 20 nt, synthetic construct
  source 1..20: mol_type = other RNA
agcaacctgtggggcttctc

SEQ ID NO: 1559 - RNA, 20 nt, synthetic construct
  source 1..20: mol_type = other RNA
ctcctgggggcggggtcaga

SEQ ID NO: 1560 - RNA, 20 nt, synthetic construct
  source 1..20: mol_type = other RNA
gctcctgggggcggggtcag

SEQ ID NO: 1561 - RNA, 20 nt, synthetic construct
  source 1..20: mol_type = other RNA
gcagggctgtaaaaaaagga

SEQ ID NO: 1562 - RNA, 20 nt, synthetic construct
  source 1..20: mol_type = other RNA
catcatcttcatttcatgat

SEQ ID NO: 1563 - RNA, 20 nt, synthetic construct
  source 1..20: mol_type = other RNA
ccatcatcttcatttcatga

SEQ ID NO: 1564 - RNA, 20 nt, synthetic construct
  source 1..20: mol_type = other RNA
gtccattgtcacagcctctg

SEQ ID NO: 1565 - RNA, 20 nt, synthetic construct
  source 1..20: mol_type = other RNA
cactcacccatctttcctct

SEQ ID NO: 1566 - RNA, 20 nt, synthetic construct
  source 1..20: mol_type = other RNA
acttactctgatgtaggaag

SEQ ID NO: 1567 - RNA, 20 nt, synthetic construct
  source 1..20: mol_type = other RNA
cttactctgatgtaggaagt

SEQ ID NO: 1568 - RNA, 20 nt, synthetic construct
  source 1..20: mol_type = other RNA
ttggaatacctgatagtctg

SEQ ID NO: 1569 - RNA, 20 nt, synthetic construct
  source 1..20: mol_type = other RNA
ggaacgctggaaaggagatg

SEQ ID NO: 1570 - RNA, 20 nt, synthetic construct
  source 1..20: mol_type = other RNA
gaacgctggaaaggagatga

SEQ ID NO: 1571 - RNA, 20 nt, synthetic construct
  source 1..20: mol_type = other RNA
acgtttgacatctttctccc

SEQ ID NO: 1572 - RNA, 20 nt, synthetic construct
  source 1..20: mol_type = other RNA
caaacgtgcgagtgtctaac

SEQ ID NO: 1573 - RNA, 20 nt, synthetic construct
  source 1..20: mol_type = other RNA
cgagtggcaagaggtggaga

SEQ ID NO: 1574 - RNA, 20 nt, synthetic construct
  source 1..20: mol_type = other RNA
gagtggcaagaggtggagaa

SEQ ID NO: 1575 - RNA, 20 nt, synthetic construct
  source 1..20: mol_type = other RNA
aggagagccaggatgtcagc

SEQ ID NO: 1576 - RNA, 20 nt, synthetic construct
  source 1..20: mol_type = other RNA
ggacagccagacggggttag

SEQ ID NO: 1577 - RNA, 20 nt, synthetic construct
  source 1..20: mol_type = other RNA
cggagcaatgcgcaggaata

SEQ ID NO: 1578 - RNA, 20 nt, synthetic construct
  source 1..20: mol_type = other RNA
aggaagcgacctgcaaccga

SEQ ID NO: 1579 - RNA, 20 nt, synthetic construct
  source 1..20: mol_type = other RNA
gagcagacgcccaagaagcc

SEQ ID NO: 1580 - RNA, 20 nt, synthetic construct
  source 1..20: mol_type = other RNA
gctgcagagcctgctgctct

SEQ ID NO: 1581 - RNA, 20 nt, synthetic construct
  source 1..20: mol_type = other RNA
gctcccagggctgcgtgctg

SEQ ID NO: 1582 - RNA, 20 nt, synthetic construct
  source 1..20: mol_type = other RNA
tgctcccagggctgcgtgct

SEQ ID NO: 1583 - RNA, 20 nt, synthetic construct
  source 1..20: mol_type = other RNA
atgctcccagggctgcgtgc

SEQ ID NO: 1584 - RNA, 20 nt, synthetic construct
  source 1..20: mol_type = other RNA
aggcactcaccggggttgga

SEQ ID NO: 1585 - RNA, 20 nt, synthetic construct
  source 1..20: mol_type = other RNA
ctggctcccagcagtcaaag

SEQ ID NO: 1586 - RNA, 20 nt, synthetic construct
  source 1..20: mol_type = other RNA
tgacatcttctcaggagctc

SEQ ID NO: 1587 - RNA, 20 nt, synthetic construct
  source 1..20: mol_type = other RNA
tcacggcatgaggctgagtt

SEQ ID NO: 1588 - RNA, 20 nt, synthetic construct
  source 1..20: mol_type = other RNA
gaaccaactggggagcagca

SEQ ID NO: 1589 - RNA, 20 nt, synthetic construct
  source 1..20: mol_type = other RNA
ggaaccaactggggagcagc

SEQ ID NO: 1590 - RNA, 20 nt, synthetic construct
  source 1..20: mol_type = other RNA
tcacctccaccagctgcatg

SEQ ID NO: 1591 - RNA, 20 nt, synthetic construct
  source 1..20: mol_type = other RNA
gtagtgctgcagggtgtggg

SEQ ID NO: 1592 - RNA, 20 nt, synthetic construct
  source 1..20: mol_type = other RNA
tgtagtgctgcagggtgtgg

SEQ ID NO: 1593 - RNA, 20 nt, synthetic construct
  source 1..20: mol_type = other RNA
cacgtctgggggcagagagg

SEQ ID NO: 1594 - RNA, 20 nt, synthetic construct
  source 1..20: mol_type = other RNA
catcacgtctgggggcagag

SEQ ID NO: 1595 - RNA, 20 nt, synthetic construct
  source 1..20: mol_type = other RNA
aggctcccctgggggcagga

SEQ ID NO: 1596 - RNA, 20 nt, synthetic construct
  source 1..20: mol_type = other RNA
tcactcacagcgagaacttg

SEQ ID NO: 1597 - RNA, 20 nt, synthetic construct
  source 1..20: mol_type = other RNA
cagccccaccttctctctca

SEQ ID NO: 1598 - RNA, 20 nt, synthetic construct
  source 1..20: mol_type = other RNA
gagaatttctgccatgtgga

SEQ ID NO: 1599 - RNA, 20 nt, synthetic construct
  source 1..20: mol_type = other RNA
atactcacaattcttggata

SEQ ID NO: 1600 - RNA, 20 nt, synthetic construct
  source 1..20: mol_type = other RNA
caggggctgtggccaggggg

SEQ ID NO: 1601 - RNA, 20 nt, synthetic construct
  source 1..20: mol_type = other RNA
actcacctttgcagaagaca

SEQ ID NO: 1602 - RNA, 20 nt, synthetic construct
  source 1..20: mol_type = other RNA
cactcacctttgcagaagac

SEQ ID NO: 1603 - RNA, 20 nt, synthetic construct
  source 1..20: mol_type = other RNA
agggccaggtcctggtagcc

SEQ ID NO: 1604 - RNA, 20 nt, synthetic construct
  source 1..20: mol_type = other RNA
ggcccagcctgctgtggtac

SEQ ID NO: 1605 - RNA, 20 nt, synthetic construct
  source 1..20: mol_type = other RNA
gcttcggcaggctgacagcc

SEQ ID NO: 1606 - RNA, 20 nt, synthetic construct
  source 1..20: mol_type = other RNA
tatccaaggactgagggcca

SEQ ID NO: 1607 - RNA, 20 nt, synthetic construct
  source 1..20: mol_type = other RNA
ggaacccagatttatgtaat

SEQ ID NO: 1608 - RNA, 20 nt, synthetic construct
  source 1..20: mol_type = other RNA
gctcaccaattacataaatc

SEQ ID NO: 1609 - RNA, 20 nt, synthetic construct
  source 1..20: mol_type = other RNA
ctcaccaattacataaatct

SEQ ID NO: 1610 - RNA, 20 nt, synthetic construct
  source 1..20: mol_type = other RNA
ctcagctgaacctggctacc

SEQ ID NO: 1611 - RNA, 20 nt, synthetic construct
  source 1..20: mol_type = other RNA
ttaacatctactacatacaa

SEQ ID NO: 1612 - RNA, 20 nt, synthetic construct
  source 1..20: mol_type = other RNA
cttacctggatatagtcaac

SEQ ID NO: 1613 - RNA, 20 nt, synthetic construct
  source 1..20: mol_type = other RNA
atccagcgtaagaataacag

SEQ ID NO: 1614 - RNA, 20 nt, synthetic construct
  source 1..20: mol_type = other RNA
gtatgtacaacaaaataatg

SEQ ID NO: 1615 - RNA, 20 nt, synthetic construct
  source 1..20: mol_type = other RNA
cgagatcaagttgtacgtta

SEQ ID NO: 1616 - RNA, 20 nt, synthetic construct
  source 1..20: mol_type = other RNA
tgccagatgttaatgatttt

SEQ ID NO: 1617 - RNA, 20 nt, synthetic construct
  source 1..20: mol_type = other RNA
atgtcagttcacgtcaaaac

SEQ ID NO: 1618 - RNA, 20 nt, synthetic construct
  source 1..20: mol_type = other RNA
gccctacagtccctcgcctg

SEQ ID NO: 1619 - RNA, 20 nt, synthetic construct
  source 1..20: mol_type = other RNA
gtccagaatttccagaagta

SEQ ID NO: 1620 - RNA, 20 nt, synthetic construct
  source 1..20: mol_type = other RNA
tccctggaggggtgggggag

SEQ ID NO: 1621 - RNA, 20 nt, synthetic construct
  source 1..20: mol_type = other RNA
tcacttcaacaggactccta

SEQ ID NO: 1622 - RNA, 20 nt, synthetic construct
  source 1..20: mol_type = other RNA
ccttacactcaaaggcaaag

SEQ ID NO: 1623 - RNA, 20 nt, synthetic construct
  source 1..20: mol_type = other RNA
atggctgcagggagaggaag

SEQ ID NO: 1624 - RNA, 20 nt, synthetic construct
  source 1..20: mol_type = other RNA
ggagcgccaggggatgctgg

SEQ ID NO: 1625 - RNA, 20 nt, synthetic construct
  source 1..20: mol_type = other RNA
tcacgtcccatgcagccaca

SEQ ID NO: 1626 - RNA, 20 nt, synthetic construct
  source 1..20: mol_type = other RNA
tggacgtctggtggggagta

SEQ ID NO: 1627 - RNA, 20 nt, synthetic construct
  source 1..20: mol_type = other RNA
actcacattgatgaggaaga

SEQ ID NO: 1628 - RNA, 20 nt, synthetic construct
  source 1..20: mol_type = other RNA
cagcatctgagaaaggcaga

SEQ ID NO: 1629 - RNA, 20 nt, synthetic construct
  source 1..20: mol_type = other RNA
aatccaacacctcagcgatg

SEQ ID NO: 1630 - RNA, 20 nt, synthetic construct
  source 1..20: mol_type = other RNA
atccaacacctcagcgatgt

SEQ ID NO: 1631 - RNA, 20 nt, synthetic construct
  source 1..20: mol_type = other RNA
gtggccattccttagtcttg

SEQ ID NO: 1632 - RNA, 20 nt, synthetic construct
  source 1..20: mol_type = other RNA
cttaccgatgttcccttcga

SEQ ID NO: 1633 - RNA, 20 nt, synthetic construct
  source 1..20: mol_type = other RNA
ttaaacaattgtgtgaagat

SEQ ID NO: 1634 - RNA, 20 nt, synthetic construct
  source 1..20: mol_type = other RNA
taaacaattgtgtgaagatt

SEQ ID NO: 1635 - RNA, 20 nt, synthetic construct
  source 1..20: mol_type = other RNA
caccatctggcaacaggttc

SEQ ID NO: 1636 - RNA, 20 nt, synthetic construct
  source 1..20: mol_type = other RNA
aagtactcaagatgaatttg

SEQ ID NO: 1637 - RNA, 20 nt, synthetic construct
  source 1..20: mol_type = other RNA
caatgtctcagaaaaatggt

SEQ ID NO: 1638 - RNA, 20 nt, synthetic construct
  source 1..20: mol_type = other RNA
gctcagcttgcctctctgaa

SEQ ID NO: 1639 - RNA, 20 nt, synthetic construct
  source 1..20: mol_type = other RNA
tttatcaagactggcatgac

SEQ ID NO: 1640 - RNA, 20 nt, synthetic construct
  source 1..20: mol_type = other RNA
atttggccaaagccttgaat

SEQ ID NO: 1641 - RNA, 20 nt, synthetic construct
  source 1..20: mol_type = other RNA
ttatcttcaagccactccag

SEQ ID NO: 1642 - RNA, 20 nt, synthetic construct
  source 1..20: mol_type = other RNA
cttacttcagtgtcctatgc

SEQ ID NO: 1643 - RNA, 20 nt, synthetic construct
  source 1..20: mol_type = other RNA
accccattttgttccgcctc

SEQ ID NO: 1644 - RNA, 20 nt, synthetic construct
  source 1..20: mol_type = other RNA
tcacattctaacttgtcttc

SEQ ID NO: 1645 - RNA, 20 nt, synthetic construct
  source 1..20: mol_type = other RNA
tgactgtggggtgttttagg

SEQ ID NO: 1646 - RNA, 20 nt, synthetic construct
  source 1..20: mol_type = other RNA
gtgactgtggggtgttttag

SEQ ID NO: 1647 - RNA, 20 nt, synthetic construct
  source 1..20: mol_type = other RNA
ggtgactgtggggtgtttta

SEQ ID NO: 1648 - RNA, 20 nt, synthetic construct
  source 1..20: mol_type = other RNA
aggtgactgtggggtgtttt

SEQ ID NO: 1649 - RNA, 20 nt, synthetic construct
  source 1..20: mol_type = other RNA
aatctgagcacagagtggaa

SEQ ID NO: 1650 - RNA, 20 nt, synthetic construct
  source 1..20: mol_type = other RNA
tgaagaatctgagcacagag

SEQ ID NO: 1651 - RNA, 20 nt, synthetic construct
  source 1..20: mol_type = other RNA
tgattggaccttggggagaa

SEQ ID NO: 1652 - RNA, 20 nt, synthetic construct
  source 1..20: mol_type = other RNA
gtggatctgaaagacgaggt

SEQ ID NO: 1653 - RNA, 20 nt, synthetic construct
  source 1..20: mol_type = other RNA
cgtggatctgaaagacgagg

SEQ ID NO: 1654 - RNA, 20 nt, synthetic construct
  source 1..20: mol_type = other RNA
ctgtacccgcagagcctcag

SEQ ID NO: 1655 - RNA, 20 nt, synthetic construct
  source 1..20: mol_type = other RNA
aatcggagcctgagacaaag

SEQ ID NO: 1656 - RNA, 20 nt, synthetic construct
  source 1..20: mol_type = other RNA
acttacctcctccccatctt

SEQ ID NO: 1657 - RNA, 20 nt, synthetic construct
  source 1..20: mol_type = other RNA
aacctaggagtggagaagac

SEQ ID NO: 1658 - RNA, 20 nt, synthetic construct
  source 1..20: mol_type = other RNA
agaggcatcctggagagttc

SEQ ID NO: 1659 - RNA, 20 nt, synthetic construct
  source 1..20: mol_type = other RNA
cccacagatctgagaggagg

SEQ ID NO: 1660 - RNA, 20 nt, synthetic construct
  source 1..20: mol_type = other RNA
ttaggtctggggacgaagta

SEQ ID NO: 1661 - RNA, 20 nt, synthetic construct
  source 1..20: mol_type = other RNA
cttaggtctggggacgaagt

SEQ ID NO: 1662 - RNA, 20 nt, synthetic construct
  source 1..20: mol_type = other RNA
tgtggtgctataggaggcca

SEQ ID NO: 1663 - RNA, 20 nt, synthetic construct
  source 1..20: mol_type = other RNA
gaccctggaagagttggggc

SEQ ID NO: 1664 - RNA, 20 nt, synthetic construct
  source 1..20: mol_type = other RNA
ctgactcctagccacgggat

SEQ ID NO: 1665 - RNA, 20 nt, synthetic construct
  source 1..20: mol_type = other RNA
ctgctgcaggacaggaagag

SEQ ID NO: 1666 - RNA, 20 nt, synthetic construct
  source 1..20: mol_type = other RNA
acttacctcgcggacattcc

SEQ ID NO: 1667 - RNA, 20 nt, synthetic construct
  source 1..20: mol_type = other RNA
aaggttggctgggggagaag

SEQ ID NO: 1668 - RNA, 20 nt, synthetic construct
  source 1..20: mol_type = other RNA
aaaggttggctgggggagaa

SEQ ID NO: 1669 - RNA, 20 nt, synthetic construct
  source 1..20: mol_type = other RNA
atccctgagggtagacagga

SEQ ID NO: 1670 - RNA, 20 nt, synthetic construct
  source 1..20: mol_type = other RNA
tggaatccctgagggtagac

SEQ ID NO: 1671 - RNA, 20 nt, synthetic construct
  source 1..20: mol_type = other RNA
gtggtactgaggagagcgag

SEQ ID NO: 1672 - RNA, 20 nt, synthetic construct
  source 1..20: mol_type = other RNA
tgtggtactgaggagagcga

SEQ ID NO: 1673 - RNA, 20 nt, synthetic construct
  source 1..20: mol_type = other RNA
ctgtggtactgaggagagcg

SEQ ID NO: 1674 - RNA, 20 nt, synthetic construct
  source 1..20: mol_type = other RNA
agtactcacctggggcctcc

SEQ ID NO: 1675 - RNA, 20 nt, synthetic construct
  source 1..20: mol_type = other RNA
gtattctgcaagggaagcag

SEQ ID NO: 1676 - RNA, 20 nt, synthetic construct
  source 1..20: mol_type = other RNA
agtattctgcaagggaagca

SEQ ID NO: 1677 - RNA, 20 nt, synthetic construct
  source 1..20: mol_type = other RNA
gagtattctgcaagggaagc

SEQ ID NO: 1678 - RNA, 20 nt, synthetic construct
  source 1..20: mol_type = other RNA
ctcctgggagacaaggtgag

SEQ ID NO: 1679 - RNA, 20 nt, synthetic construct
  source 1..20: mol_type = other RNA
tttgcaccctggatgggatg

SEQ ID NO: 1680 - RNA, 20 nt, synthetic construct
  source 1..20: mol_type = other RNA
agcctgggctcatgggaaga

SEQ ID NO: 1681 - RNA, 20 nt, synthetic construct
  source 1..20: mol_type = other RNA
gcttaccccaccccagttga

SEQ ID NO: 1682 - RNA, 20 nt, synthetic construct
  source 1..20: mol_type = other RNA
tgcttaccccaccccagttg

SEQ ID NO: 1683 - RNA, 20 nt, synthetic construct
  source 1..20: mol_type = other RNA
tagccctgggggagcaggca

SEQ ID NO: 1684 - RNA, 20 nt, synthetic construct
  source 1..20: mol_type = other RNA
gtagccctgggggagcaggc

SEQ ID NO: 1685 - RNA, 20 nt, synthetic construct
  source 1..20: mol_type = other RNA
ggcaactggaaaaaggtcaa

SEQ ID NO: 1686 - RNA, 20 nt, synthetic construct
  source 1..20: mol_type = other RNA
gggcaactggaaaaaggtca

SEQ ID NO: 1687 - RNA, 20 nt, synthetic construct
  source 1..20: mol_type = other RNA
gctgccaacctcgagactcg

SEQ ID NO: 1688 - RNA, 20 nt, synthetic construct
  source 1..20: mol_type = other RNA
agctgtctgtgggagacaga

SEQ ID NO: 1689 - RNA, 20 nt, synthetic construct
  source 1..20: mol_type = other RNA
aagctgtctgtgggagacag

SEQ ID NO: 1690 - RNA, 20 nt, synthetic construct
  source 1..20: mol_type = other RNA
ctcctcacctggggatgttc

SEQ ID NO: 1691 - RNA, 20 nt, synthetic construct
  source 1..20: mol_type = other RNA
cccactcaccaacgacgtca

SEQ ID NO: 1692 - RNA, 20 nt, synthetic construct
  source 1..20: mol_type = other RNA
gtactcgctgtgcagggggg

SEQ ID NO: 1693 - RNA, 20 nt, synthetic construct
  source 1..20: mol_type = other RNA
gacgtactcgctgtgcaggg

SEQ ID NO: 1694 - RNA, 20 nt, synthetic construct
  source 1..20: mol_type = other RNA
ggacgtactcgctgtgcagg

SEQ ID NO: 1695 - RNA, 20 nt, synthetic construct
  source 1..20: mol_type = other RNA
gggacgtactcgctgtgcag

SEQ ID NO: 1696 - RNA, 20 nt, synthetic construct
  source 1..20: mol_type = other RNA
tgctggctgtcgggcagggc

SEQ ID NO: 1697 - RNA, 20 nt, synthetic construct
  source 1..20: mol_type = other RNA
gctcctgttgagagaagcaa

SEQ ID NO: 1698 - RNA, 20 nt, synthetic construct
  source 1..20: mol_type = other RNA
agtggtggctgtgggagaga

SEQ ID NO: 1699 - RNA, 20 nt, synthetic construct
  source 1..20: mol_type = other RNA
gctcctgtggggggaggtca

SEQ ID NO: 1700 - RNA, 20 nt, synthetic construct
  source 1..20: mol_type = other RNA
tgctcctgtggggggaggtc

SEQ ID NO: 1701 - RNA, 20 nt, synthetic construct
  source 1..20: mol_type = other RNA
tcaccggggcgtgggtgagc

SEQ ID NO: 1702 - RNA, 20 nt, synthetic construct
  source 1..20: mol_type = other RNA
ggagctgagggcaggaggca

SEQ ID NO: 1703 - RNA, 20 nt, synthetic construct
  source 1..20: mol_type = other RNA
ccggctcaccgtggtccagc

SEQ ID NO: 1704 - RNA, 20 nt, synthetic construct
  source 1..20: mol_type = other RNA
gggggctggagaaggggagg

SEQ ID NO: 1705 - RNA, 20 nt, synthetic construct
  source 1..20: mol_type = other RNA
tgggggggctggagaagggg

SEQ ID NO: 1706 - RNA, 20 nt, synthetic construct
  source 1..20: mol_type = other RNA
cccgctgggggagcaggggc

SEQ ID NO: 1707 - RNA, 20 nt, synthetic construct
  source 1..20: mol_type = other RNA
tctccccgctgggggagcag

SEQ ID NO: 1708 - RNA, 20 nt, synthetic construct
  source 1..20: mol_type = other RNA
acactggaggcgggcgggga

SEQ ID NO: 1709 - RNA, 20 nt, synthetic construct
  source 1..20: mol_type = other RNA
cacactggaggcgggcgggg

SEQ ID NO: 1710 - RNA, 20 nt, synthetic construct
  source 1..20: mol_type = other RNA
catcacactggaggcgggcg

SEQ ID NO: 1711 - RNA, 20 nt, synthetic construct
  source 1..20: mol_type = other RNA
ctacgcgagcagggcgctcc

SEQ ID NO: 1712 - RNA, 20 nt, synthetic construct
  source 1..20: mol_type = other RNA
tggctgttgggcacagagac

SEQ ID NO: 1713 - RNA, 20 nt, synthetic construct
  source 1..20: mol_type = other RNA
actgacttctgctgcaggac

SEQ ID NO: 1714 - RNA, 20 nt, synthetic construct
  source 1..20: mol_type = other RNA
tccccatggcgactaggcca

SEQ ID NO: 1715 - RNA, 20 nt, synthetic construct
  source 1..20: mol_type = other RNA
ttccccatggcgactaggcc

SEQ ID NO: 1716 - RNA, 20 nt, synthetic construct
  source 1..20: mol_type = other RNA
gaacctgcatttccggggag

SEQ ID NO: 1717 - RNA, 20 nt, synthetic construct
  source 1..20: mol_type = other RNA
gtggcgaacctgcatttccg

SEQ ID NO: 1718 - RNA, 20 nt, synthetic construct
  source 1..20: mol_type = other RNA
tcactgggggaggaagaaca

SEQ ID NO: 1719 - RNA, 20 nt, synthetic construct
  source 1..20: mol_type = other RNA
accctgtatgggcagagttc

SEQ ID NO: 1720 - RNA, 20 nt, synthetic construct
  source 1..20: mol_type = other RNA
gaccctgtatgggcagagtt

SEQ ID NO: 1721 - RNA, 20 nt, synthetic construct
  source 1..20: mol_type = other RNA
aagtcctggggggaggtccg

SEQ ID NO: 1722 - RNA, 20 nt, synthetic construct
  source 1..20: mol_type = other RNA
gaagtcctggggggaggtcc

SEQ ID NO: 1723 - RNA, 20 nt, synthetic construct
  source 1..20: mol_type = other RNA
ggaagtcctggggggaggtc

SEQ ID NO: 1724 - RNA, 20 nt, synthetic construct
  source 1..20: mol_type = other RNA
aggttcctctgcaaaaggac

SEQ ID NO: 1725 - RNA, 20 nt, synthetic construct
  source 1..20: mol_type = other RNA
gttaccttgatgaccggcgg

SEQ ID NO: 1726 - RNA, 20 nt, synthetic construct
  source 1..20: mol_type = other RNA
tgtgttaccttgatgaccgg

SEQ ID NO: 1727 - RNA, 20 nt, synthetic construct
  source 1..20: mol_type = other RNA
cacctgtgggacgcccagga

SEQ ID NO: 1728 - RNA, 20 nt, synthetic construct
  source 1..20: mol_type = other RNA
attccacctgtgggacgccc

SEQ ID NO: 1729 - RNA, 20 nt, synthetic construct
  source 1..20: mol_type = other RNA
cctcacctgcgggcagcatc

SEQ ID NO: 1730 - RNA, 20 nt, synthetic construct
  source 1..20: mol_type = other RNA
atgccacctgtggaaagaat

SEQ ID NO: 1731 - RNA, 20 nt, synthetic construct
  source 1..20: mol_type = other RNA
gatgccacctgtggaaagaa

SEQ ID NO: 1732 - RNA, 20 nt, synthetic construct
  source 1..20: mol_type = other RNA
tttaccttgtggccgggctc

SEQ ID NO: 1733 - RNA, 20 nt, synthetic construct
  source 1..20: mol_type = other RNA
tttctgggagaggggcaggt

SEQ ID NO: 1734 - RNA, 20 nt, synthetic construct
  source 1..20: mol_type = other RNA
tccttttctgggagaggggc

SEQ ID NO: 1735 - RNA, 20 nt, synthetic construct
  source 1..20: mol_type = other RNA
ctcacctggagggaaagcag

SEQ ID NO: 1736 - RNA, 20 nt, synthetic construct
  source 1..20: mol_type = other RNA
ttacctgtgcttgcttctct

SEQ ID NO: 1737 - RNA, 20 nt, synthetic construct
  source 1..20: mol_type = other RNA
gttacctgtgcttgcttctc

SEQ ID NO: 1738 - RNA, 20 nt, synthetic construct
  source 1..20: mol_type = other RNA
aagacctaggattcggggaa

SEQ ID NO: 1739 - RNA, 20 nt, synthetic construct
  source 1..20: mol_type = other RNA
aaagacctaggattcgggga

SEQ ID NO: 1740 - RNA, 20 nt, synthetic construct
  source 1..20: mol_type = other RNA
acccacctgtagcagtggcc

SEQ ID NO: 1741 - RNA, 20 nt, synthetic construct
  source 1..20: mol_type = other RNA
gacccacctgtagcagtggc

SEQ ID NO: 1742 - RNA, 20 nt, synthetic construct
  source 1..20: mol_type = other RNA
agcctggatggagagaaacc

SEQ ID NO: 1743 - RNA, 20 nt, synthetic construct
  source 1..20: mol_type = other RNA
cagcctggatggagagaaac

SEQ ID NO: 1744 - RNA, 20 nt, synthetic construct
  source 1..20: mol_type = other RNA
ccttacctttctgctttctg

SEQ ID NO: 1745 - RNA, 20 nt, synthetic construct
  source 1..20: mol_type = other RNA
gccttacctttctgctttct

SEQ ID NO: 1746 - RNA, 20 nt, synthetic construct
  source 1..20: mol_type = other RNA
ggccttacctttctgctttc

SEQ ID NO: 1747 - RNA, 20 nt, synthetic construct
  source 1..20: mol_type = other RNA
caccctggagatggaggtgg

SEQ ID NO: 1748 - RNA, 20 nt, synthetic construct
  source 1..20: mol_type = other RNA
cttcaccctggagatggagg

SEQ ID NO: 1749 - RNA, 20 nt, synthetic construct
  source 1..20: mol_type = other RNA
acaaacccagcagcaccatg

SEQ ID NO: 1750 - RNA, 20 nt, synthetic construct
  source 1..20: mol_type = other RNA
gcgcctggggaacgaagagg

SEQ ID NO: 1751 - RNA, 20 nt, synthetic construct
  source 1..20: mol_type = other RNA
ggcgcctggggaacgaagag

SEQ ID NO: 1752 - RNA, 20 nt, synthetic construct
  source 1..20: mol_type = other RNA
cggcgcctggggaacgaaga

SEQ ID NO: 1753 - RNA, 20 nt, synthetic construct
  source 1..20: mol_type = other RNA
acggcgcctggggaacgaag

SEQ ID NO: 1754 - RNA, 20 nt, synthetic construct
  source 1..20: mol_type = other RNA
ccgtacctgcggtggtcagc

SEQ ID NO: 1755 - RNA, 20 nt, synthetic construct
  source 1..20: mol_type = other RNA
agacgcctgggggccggggg

SEQ ID NO: 1756 - RNA, 20 nt, synthetic construct
  source 1..20: mol_type = other RNA
actcacagaacacgctggcc

SEQ ID NO: 1757 - RNA, 20 nt, synthetic construct
  source 1..20: mol_type = other RNA
cacctacctgcccttccagc

SEQ ID NO: 1758 - RNA, 20 nt, synthetic construct
  source 1..20: mol_type = other RNA
aagacctgatgagagaccac

SEQ ID NO: 1759 - RNA, 20 nt, synthetic construct
  source 1..20: mol_type = other RNA
gcaggtctgcaggggaggga

SEQ ID NO: 1760 - RNA, 20 nt, synthetic construct
  source 1..20: mol_type = other RNA
acgtcctgggggcggcgggc

SEQ ID NO: 1761 - RNA, 20 nt, synthetic construct
  source 1..20: mol_type = other RNA
gtcatcctgaggagagaagc

SEQ ID NO: 1762 - RNA, 20 nt, synthetic construct
  source 1..20: mol_type = other RNA
tcactgcacggcttgttcat

SEQ ID NO: 1763 - RNA, 20 nt, synthetic construct
  source 1..20: mol_type = other RNA
atgcaggctatgggggtggg

SEQ ID NO: 1764 - RNA, 20 nt, synthetic construct
  source 1..20: mol_type = other RNA
catgcaggctatgggggtgg

SEQ ID NO: 1765 - RNA, 20 nt, synthetic construct
  source 1..20: mol_type = other RNA
gtctttttcattgactagaa

SEQ ID NO: 1766 - RNA, 20 nt, synthetic construct
  source 1..20: mol_type = other RNA
tgacttaccttaacgttttc

SEQ ID NO: 1767 - RNA, 20 nt, synthetic construct
  source 1..20: mol_type = other RNA
tgcatcaagtagaagaatgc

SEQ ID NO: 1768 - RNA, 20 nt, synthetic construct
  source 1..20: mol_type = other RNA
ctctttccatgcaatcagtc

SEQ ID NO: 1769 - RNA, 20 nt, synthetic construct
  source 1..20: mol_type = other RNA
gttcagaaagtaaatgaaat

SEQ ID NO: 1770 - RNA, 20 nt, synthetic construct
  source 1..20: mol_type = other RNA
tcactttccatcctgtacaa

SEQ ID NO: 1771 - RNA, 20 nt, synthetic construct
  source 1..20: mol_type = other RNA
ggccaagaggaaggtgccta

SEQ ID NO: 1772 - RNA, 20 nt, synthetic construct
  source 1..20: mol_type = other RNA
gctctgcaatttcgcctcta

SEQ ID NO: 1773 - RNA, 20 nt, synthetic construct
  source 1..20: mol_type = other RNA
actctggcagaaactggcca

SEQ ID NO: 1774 - RNA, 20 nt, synthetic construct
  source 1..20: mol_type = other RNA
tatacttgcctgaatgtcct

SEQ ID NO: 1775 - RNA, 20 nt, synthetic construct
  source 1..20: mol_type = other RNA
aacttaccccaaaatccccc

SEQ ID NO: 1776 - RNA, 20 nt, synthetic construct
  source 1..20: mol_type = other RNA
ctgtgctcagccttgggagg

SEQ ID NO: 1777 - RNA, 20 nt, synthetic construct
  source 1..20: mol_type = other RNA
ttttatctagaagtgaagtg

SEQ ID NO: 1778 - RNA, 20 nt, synthetic construct
  source 1..20: mol_type = other RNA
tttatctagaagtgaagtga

SEQ ID NO: 1779 - RNA, 20 nt, synthetic construct
  source 1..20: mol_type = other RNA
ttatctagaagtgaagtgag

SEQ ID NO: 1780 - RNA, 20 nt, synthetic construct
  source 1..20: mol_type = other RNA
tatctagaagtgaagtgagg

SEQ ID NO: 1781 - RNA, 20 nt, synthetic construct
  source 1..20: mol_type = other RNA
aaattaccttgccaatgaaa

SEQ ID NO: 1782 - RNA, 20 nt, synthetic construct
  source 1..20: mol_type = other RNA
cccaccttcttccccaggcg

SEQ ID NO: 1783 - RNA, 20 nt, synthetic construct
  source 1..20: mol_type = other RNA
gagcagaacgacctggagcc

SEQ ID NO: 1784 - RNA, 20 nt, synthetic construct
  source 1..20: mol_type = other RNA
gtcctgccagatgaacctgg

SEQ ID NO: 1785 - RNA, 20 nt, synthetic construct
  source 1..20: mol_type = other RNA
cctggtacaagaggttcagc

SEQ ID NO: 1786 - RNA, 20 nt, synthetic construct
  source 1..20: mol_type = other RNA
gtgacctccagaacaggagt

SEQ ID NO: 1787 - RNA, 20 nt, synthetic construct
  source 1..20: mol_type = other RNA
tgacctccagaacaggagtg

SEQ ID NO: 1788 - RNA, 20 nt, synthetic construct
  source 1..20: mol_type = other RNA
gttccatgacatcggggaca

SEQ ID NO: 1789 - RNA, 20 nt, synthetic construct
  source 1..20: mol_type = other RNA
ggagttcatagctgggctcc

SEQ ID NO: 1790 - RNA, 20 nt, synthetic construct
  source 1..20: mol_type = other RNA
cctacccacctcctttctca

SEQ ID NO: 1791 - RNA, 20 nt, synthetic construct
  source 1..20: mol_type = other RNA
gtacctcattgaatccagat

SEQ ID NO: 1792 - RNA, 20 nt, synthetic construct
  source 1..20: mol_type = other RNA
cttccaatctggattcaatg

SEQ ID NO: 1793 - RNA, 20 nt, synthetic construct
  source 1..20: mol_type = other RNA
ctcctaagaggaaagatggt

SEQ ID NO: 1794 - RNA, 20 nt, synthetic construct
  source 1..20: mol_type = other RNA
tctcctaagaggaaagatgg

SEQ ID NO: 1795 - RNA, 20 nt, synthetic construct
  source 1..20: mol_type = other RNA
aagtctcctaagaggaaaga

SEQ ID NO: 1796 - RNA, 20 nt, synthetic construct
  source 1..20: mol_type = other RNA
ccacctttttctgcaggaac

SEQ ID NO: 1797 - RNA, 20 nt, synthetic construct
  source 1..20: mol_type = other RNA
agctgcaggcacagaaccag

SEQ ID NO: 1798 - RNA, 20 nt, synthetic construct
  source 1..20: mol_type = other RNA
ggcacagaaccagtggctgc

SEQ ID NO: 1799 - RNA, 20 nt, synthetic construct
  source 1..20: mol_type = other RNA
gttcctgcagtccagcctga

SEQ ID NO: 1800 - RNA, 20 nt, synthetic construct
  source 1..20: mol_type = other RNA
tgggggtactggggcaggga

SEQ ID NO: 1801 - RNA, 20 nt, synthetic construct
  source 1..20: mol_type = other RNA
attccctcaacttggtgtgg

SEQ ID NO: 1802 - RNA, 20 nt, synthetic construct
  source 1..20: mol_type = other RNA
cggccagcatgcttcctcct

SEQ ID NO: 1803 - RNA, 20 nt, synthetic construct
  source 1..20: mol_type = other RNA
tgactgttagacacaaaaca

SEQ ID NO: 1804 - RNA, 20 nt, synthetic construct
  source 1..20: mol_type = other RNA
ctcctgccagttagcagtcc

SEQ ID NO: 1805 - RNA, 20 nt, synthetic construct
  source 1..20: mol_type = other RNA
actcaaacctttcagggttg

SEQ ID NO: 1806 - RNA, 20 nt, synthetic construct
  source 1..20: mol_type = other RNA
cctggcaagacccccactcc

SEQ ID NO: 1807 - RNA, 20 nt, synthetic construct
  source 1..20: mol_type = other RNA
ttgacctgagggcgggggca

SEQ ID NO: 1808 - RNA, 20 nt, synthetic construct
  source 1..20: mol_type = other RNA
cgtggtgcagcttcgtgccc

SEQ ID NO: 1809 - RNA, 20 nt, synthetic construct
  source 1..20: mol_type = other RNA
acctgtccaaggcgtgccca

SEQ ID NO: 1810 - RNA, 20 nt, synthetic construct
  source 1..20: mol_type = other RNA
ctgggtcccaaatgccaccc

SEQ ID NO: 1811 - RNA, 20 nt, synthetic construct
  source 1..20: mol_type = other RNA
ggattctgcggacagaagaa

SEQ ID NO: 1812 - RNA, 20 nt, synthetic construct
  source 1..20: mol_type = other RNA
ggagctcacctgcatggggg

SEQ ID NO: 1813 - RNA, 20 nt, synthetic construct
  source 1..20: mol_type = other RNA
tttgctgcaggaagaacaaa

SEQ ID NO: 1814 - RNA, 20 nt, synthetic construct
  source 1..20: mol_type = other RNA
gcagcaaatgaaggatcagc

SEQ ID NO: 1815 - RNA, 20 nt, synthetic construct
  source 1..20: mol_type = other RNA
accctaagggcaggagccaa

SEQ ID NO: 1816 - RNA, 20 nt, synthetic construct
  source 1..20: mol_type = other RNA
gatgatccagttttacctgg

SEQ ID NO: 1817 - RNA, 20 nt, synthetic construct
  source 1..20: mol_type = other RNA
gaaccaagacccagacatca

SEQ ID NO: 1818 - RNA, 20 nt, synthetic construct
  source 1..20: mol_type = other RNA
ccaggcagtgtgagtcagct

SEQ ID NO: 1819 - RNA, 20 nt, synthetic construct
  source 1..20: mol_type = other RNA
tggccctccagctgtatgtg

SEQ ID NO: 1820 - RNA, 20 nt, synthetic construct
  source 1..20: mol_type = other RNA
cttcaaaccacacagacgga

SEQ ID NO: 1821 - RNA, 20 nt, synthetic construct
  source 1..20: mol_type = other RNA
tgggtgtccagtggaggatg

SEQ ID NO: 1822 - RNA, 20 nt, synthetic construct
  source 1..20: mol_type = other RNA
gcttcaaaccacacagacgg

SEQ ID NO: 1823 - RNA, 20 nt, synthetic construct
  source 1..20: mol_type = other RNA
tccatacctgaggagatacc

SEQ ID NO: 1824 - RNA, 20 nt, synthetic construct
  source 1..20: mol_type = other RNA
tgacggtccagttggagtgc

SEQ ID NO: 1825 - RNA, 20 nt, synthetic construct
  source 1..20: mol_type = other RNA
ccccataccgtgaagtttcc

SEQ ID NO: 1826 - RNA, 20 nt, synthetic construct
  source 1..20: mol_type = other RNA
tgactcacactgcctggtga

SEQ ID NO: 1827 - RNA, 20 nt, synthetic construct
  source 1..20: mol_type = other RNA
ctgactcacactgcctggtg

SEQ ID NO: 1828 - RNA, 20 nt, synthetic construct
  source 1..20: mol_type = other RNA
accaggcagtgtgagtcagc

SEQ ID NO: 1829 - RNA, 20 nt, synthetic construct
  source 1..20: mol_type = other RNA
ttgaagagctggggaagaga

SEQ ID NO: 1830 - RNA, 20 nt, synthetic construct
  source 1..20: mol_type = other RNA
agctccagtcagatattccc

SEQ ID NO: 1831 - RNA, 20 nt, synthetic construct
  source 1..20: mol_type = other RNA
agttcaaaactctgagggcc

SEQ ID NO: 1832 - RNA, 20 nt, synthetic construct
  source 1..20: mol_type = other RNA
tagttcaaaactctgagggc

SEQ ID NO: 1833 - RNA, 20 nt, synthetic construct
  source 1..20: mol_type = other RNA
ctggttccactgtcccgttg

SEQ ID NO: 1834 - RNA, 20 nt, synthetic construct
  source 1..20: mol_type = other RNA
gctggttccactgtcccgtt

SEQ ID NO: 1835 - RNA, 20 nt, synthetic construct
  source 1..20: mol_type = other RNA
tggcattccagggttacctg

SEQ ID NO: 1836 - RNA, 20 nt, synthetic construct
  source 1..20: mol_type = other RNA
ggctggttccactgtcccgt

SEQ ID NO: 1837 - RNA, 20 nt, synthetic construct
  source 1..20: mol_type = other RNA
gccggagaccttgaagagcg

SEQ ID NO: 1838 - RNA, 20 nt, synthetic construct
  source 1..20: mol_type = other RNA
ggcggccgaggcggagagtt

SEQ ID NO: 1839 - RNA, 20 nt, synthetic construct
  source 1..20: mol_type = other RNA
cgttctcccacaccagcccg

SEQ ID NO: 1840 - RNA, 20 nt, synthetic construct
  source 1..20: mol_type = other RNA
cgcggttgtagtcctgcttg

SEQ ID NO: 1841 - RNA, 20 nt, synthetic construct
  source 1..20: mol_type = other RNA
ctaccttttttggctccctc

SEQ ID NO: 1842 - RNA, 20 nt, synthetic construct
  source 1..20: mol_type = other RNA
gtcttccaggtgggagggtc

SEQ ID NO: 1843 - RNA, 20 nt, synthetic construct
  source 1..20: mol_type = other RNA
ctcctacatgtttggggaaa

SEQ ID NO: 1844 - RNA, 20 nt, synthetic construct
  source 1..20: mol_type = other RNA
atacctgggctgggagcgaa

SEQ ID NO: 1845 - RNA, 20 nt, synthetic construct
  source 1..20: mol_type = other RNA
catacctgggctgggagcga

SEQ ID NO: 1846 - RNA, 20 nt, synthetic construct
  source 1..20: mol_type = other RNA
agccaagcagctcaccctgg

SEQ ID NO: 1847 - RNA, 20 nt, synthetic construct
  source 1..20: mol_type = other RNA
cccagcccaggtatggtgga

SEQ ID NO: 1848 - RNA, 20 nt, synthetic construct
  source 1..20: mol_type = other RNA
ctgctaaaggagtgcaggag

SEQ ID NO: 1849 - RNA, 20 nt, synthetic construct
  source 1..20: mol_type = other RNA
tccttaccattttcacaagc

SEQ ID NO: 1850 - RNA, 20 nt, synthetic construct
  source 1..20: mol_type = other RNA
ccttaccattttcacaagct

SEQ ID NO: 1851 - RNA, 20 nt, synthetic construct
  source 1..20: mol_type = other RNA
agtccctccagcttcggtcg

SEQ ID NO: 1852 - RNA, 20 nt, synthetic construct
  source 1..20: mol_type = other RNA
gtccctccagcttcggtcga

SEQ ID NO: 1853 - RNA, 20 nt, synthetic construct
  source 1..20: mol_type = other RNA
tccctccagcttcggtcgag

SEQ ID NO: 1854 - RNA, 20 nt, synthetic construct
  source 1..20: mol_type = other RNA
taccaatgtcccatgacgtt

SEQ ID NO: 1855 - RNA, 20 nt, synthetic construct
  source 1..20: mol_type = other RNA
gccttgccagtggtggccgc

SEQ ID NO: 1856 - RNA, 20 nt, synthetic construct
  source 1..20: mol_type = other RNA
ccttgccagtggtggccgcg

SEQ ID NO: 1857 - RNA, 20 nt, synthetic construct
  source 1..20: mol_type = other RNA
gcactcacctgagaacgcca

SEQ ID NO: 1858 - RNA, 20 nt, synthetic construct
  source 1..20: mol_type = other RNA
agtctgcaaacacagagctc

SEQ ID NO: 1859 - RNA, 20 nt, synthetic construct
  source 1..20: mol_type = other RNA
tgtgccagagcaggatctac

SEQ ID NO: 1860 - RNA, 20 nt, synthetic construct
  source 1..20: mol_type = other RNA
gtgccagagcaggatctact

SEQ ID NO: 1861 - RNA, 20 nt, synthetic construct
  source 1..20: mol_type = other RNA
gacacacagcagttcttgtc

SEQ ID NO: 1862 - RNA, 20 nt, synthetic construct
  source 1..20: mol_type = other RNA
ctgcaagcgtttgctcacca

SEQ ID NO: 1863 - RNA, 20 nt, synthetic construct
  source 1..20: mol_type = other RNA
ttccaggtgactctatgctt

SEQ ID NO: 1864 - RNA, 20 nt, synthetic construct
  source 1..20: mol_type = other RNA
ccttctcatggcaggtgtcc

SEQ ID NO: 1865 - RNA, 20 nt, synthetic construct
  source 1..20: mol_type = other RNA
cccacagattcagggactcc

SEQ ID NO: 1866 - RNA, 20 nt, synthetic construct
  source 1..20: mol_type = other RNA
acccacagattcagggactc

SEQ ID NO: 1867 - RNA, 20 nt, synthetic construct
  source 1..20: mol_type = other RNA
gctctttaccttaaaaatgg

SEQ ID NO: 1868 - RNA, 20 nt, synthetic construct
  source 1..20: mol_type = other RNA
ttacatttttgctcttcctc

SEQ ID NO: 1869 - RNA, 20 nt, synthetic construct
  source 1..20: mol_type = other RNA
gaaggctgcacagtcagggg

SEQ ID NO: 1870 - RNA, 20 nt, synthetic construct
  source 1..20: mol_type = other RNA
aaggctgcacagtcagggga

SEQ ID NO: 1871 - RNA, 20 nt, synthetic construct
  source 1..20: mol_type = other RNA
acagaaggctgcacagtcag

SEQ ID NO: 1872 - RNA, 20 nt, synthetic construct
  source 1..20: mol_type = other RNA
caccatctgggagaatgctg

SEQ ID NO: 1873 - RNA, 20 nt, synthetic construct
  source 1..20: mol_type = other RNA
ggagaatgctgtggacaaga

SEQ ID NO: 1874 - RNA, 20 nt, synthetic construct
  source 1..20: mol_type = other RNA
ggtacagacctcggaagaac

SEQ ID NO: 1875 - RNA, 20 nt, synthetic construct
  source 1..20: mol_type = other RNA
cagacctcggaagaactggc

SEQ ID NO: 1876 - RNA, 20 nt, synthetic construct
  source 1..20: mol_type = other RNA
ctgcagctctggaatgacac

SEQ ID NO: 1877 - RNA, 20 nt, synthetic construct
  source 1..20: mol_type = other RNA
gcacatccgggcggcccagg

SEQ ID NO: 1878 - RNA, 20 nt, synthetic construct
  source 1..20: mol_type = other RNA
ggatacggccgggcccctgg

SEQ ID NO: 1879 - RNA, 20 nt, synthetic construct
  source 1..20: mol_type = other RNA
tctggtcagggctcggacac

SEQ ID NO: 1880 - RNA, 20 nt, synthetic construct
  source 1..20: mol_type = other RNA
ggacagtacttttacccccg

SEQ ID NO: 1881 - RNA, 20 nt, synthetic construct
  source 1..20: mol_type = other RNA
gagcaggagggcttcgccga

SEQ ID NO: 1882 - RNA, 20 nt, synthetic construct
  source 1..20: mol_type = other RNA
gcgcagctgggcttgggccg

SEQ ID NO: 1883 - RNA, 20 nt, synthetic construct
  source 1..20: mol_type = other RNA
ggaaccgcagaccgtgccgg

SEQ ID NO: 1884 - RNA, 20 nt, synthetic construct
  source 1..20: mol_type = other RNA
cagccgggacgccacgccgc

SEQ ID NO: 1885 - RNA, 20 nt, synthetic construct
  source 1..20: mol_type = other RNA
agaccaagagcgcatcaaag

SEQ ID NO: 1886 - RNA, 20 nt, synthetic construct
  source 1..20: mol_type = other RNA
caagcggctgcggaaccggc

SEQ ID NO: 1887 - RNA, 20 nt, synthetic construct
  source 1..20: mol_type = other RNA
gcggctgcggaaccggctgg

SEQ ID NO: 1888 - RNA, 20 nt, synthetic construct
  source 1..20: mol_type = other RNA
tctctttccatcttctgtcg

SEQ ID NO: 1889 - RNA, 20 nt, synthetic construct
  source 1..20: mol_type = other RNA
atgacttaccctcctgcgtg

SEQ ID NO: 1890 - RNA, 20 nt, synthetic construct
  source 1..20: mol_type = other RNA
cttaccctcctgcgtgtgga

SEQ ID NO: 1891 - RNA, 20 nt, synthetic construct
  source 1..20: mol_type = other RNA
tggggttcaaacattccgcc

SEQ ID NO: 1892 - RNA, 20 nt, synthetic construct
  source 1..20: mol_type = other RNA
agctttctgtaaacaggggc

SEQ ID NO: 1893 - RNA, 20 nt, synthetic construct
  source 1..20: mol_type = other RNA
tactgaccagctgaggagcc

SEQ ID NO: 1894 - RNA, 20 nt, synthetic construct
  source 1..20: mol_type = other RNA
ctactgaccagctgaggagc

SEQ ID NO: 1895 - RNA, 20 nt, synthetic construct
  source 1..20: mol_type = other RNA
catctaagaaagacagaaac

SEQ ID NO: 1896 - RNA, 20 nt, synthetic construct
  source 1..20: mol_type = other RNA
gggggccctaaggacagtcg

SEQ ID NO: 1897 - RNA, 20 nt, synthetic construct
  source 1..20: mol_type = other RNA
ggggggccctaaggacagtc

SEQ ID NO: 1898 - RNA, 20 nt, synthetic construct
  source 1..20: mol_type = other RNA
tgtcttggggagaaaataca

SEQ ID NO: 1899 - RNA, 20 nt, synthetic construct
  source 1..20: mol_type = other RNA
ggcctaagagggagagaccc

SEQ ID NO: 1900 - RNA, 20 nt, synthetic construct
  source 1..20: mol_type = other RNA
cccataccttagcgtggaaa

SEQ ID NO: 1901 - RNA, 20 nt, synthetic construct
  source 1..20: mol_type = other RNA
acccacccatgacagcttaa

SEQ ID NO: 1902 - RNA, 20 nt, synthetic construct
  source 1..20: mol_type = other RNA
tagacctaccttaatcatgg

SEQ ID NO: 1903 - RNA, 20 nt, synthetic construct
  source 1..20: mol_type = other RNA
cacaactcctggggacagtc

SEQ ID NO: 1904 - RNA, 20 nt, synthetic construct
  source 1..20: mol_type = other RNA
aacttacatagagaataaag

SEQ ID NO: 1905 - RNA, 20 nt, synthetic construct
  source 1..20: mol_type = other RNA
acttacatagagaataaaga

SEQ ID NO: 1906 - RNA, 20 nt, synthetic construct
  source 1..20: mol_type = other RNA
gaaccagatcaggagccaac

SEQ ID NO: 1907 - RNA, 20 nt, synthetic construct
  source 1..20: mol_type = other RNA
ctgtgtactgaggggcagaa

SEQ ID NO: 1908 - RNA, 20 nt, synthetic construct
  source 1..20: mol_type = other RNA
gctgtgtactgaggggcaga

SEQ ID NO: 1909 - RNA, 20 nt, synthetic construct
  source 1..20: mol_type = other RNA
tgtactgaggggcagaaggg

SEQ ID NO: 1910 - RNA, 20 nt, synthetic construct
  source 1..20: mol_type = other RNA
ggtgctcccaggagcggagg

SEQ ID NO: 1911 - RNA, 20 nt, synthetic construct
  source 1..20: mol_type = other RNA
agaggaacaaggagacattg

SEQ ID NO: 1912 - RNA, 20 nt, synthetic construct
  source 1..20: mol_type = other RNA
gactcactcttctgtttcta

SEQ ID NO: 1913 - RNA, 20 nt, synthetic construct
  source 1..20: mol_type = other RNA
gaaaggcagcttttggcacc

SEQ ID NO: 1914 - RNA, 20 nt, synthetic construct
  source 1..20: mol_type = other RNA
agccacagaagccatgggat

SEQ ID NO: 1915 - RNA, 20 nt, synthetic construct
  source 1..20: mol_type = other RNA
cccccgggagtccatcaagt

SEQ ID NO: 1916 - RNA, 20 nt, synthetic construct
  source 1..20: mol_type = other RNA
taacctaggaagaaaaaaga

SEQ ID NO: 1917 - RNA, 20 nt, synthetic construct
  source 1..20: mol_type = other RNA
ctcacccttggccatgtact

SEQ ID NO: 1918 - RNA, 20 nt, synthetic construct
  source 1..20: mol_type = other RNA
cctgaactggaggtgaacaa

SEQ ID NO: 1919 - RNA, 20 nt, synthetic construct
  source 1..20: mol_type = other RNA
tgcaatctgaaaacagaaat

SEQ ID NO: 1920 - RNA, 20 nt, synthetic construct
  source 1..20: mol_type = other RNA
cacctaaggaagaagatatg

SEQ ID NO: 1921 - RNA, 20 nt, synthetic construct
  source 1..20: mol_type = other RNA
agcagcagccttagagcaca

SEQ ID NO: 1922 - RNA, 20 nt, synthetic construct
  source 1..20: mol_type = other RNA
cactcacccgcagggaggag

SEQ ID NO: 1923 - RNA, 20 nt, synthetic construct
  source 1..20: mol_type = other RNA
aggatcctggagaggaagga

SEQ ID NO: 1924 - RNA, 20 nt, synthetic construct
  source 1..20: mol_type = other RNA
ggatcctggagaggaaggag

SEQ ID NO: 1925 - RNA, 20 nt, synthetic construct
  source 1..20: mol_type = other RNA
gatgaccaactctgggtagg

SEQ ID NO: 1926 - RNA, 20 nt, synthetic construct
  source 1..20: mol_type = other RNA
ccttaccctcaggatttctc

SEQ ID NO: 1927 - RNA, 20 nt, synthetic construct
  source 1..20: mol_type = other RNA
gtgattcaccgggatatcaa

SEQ ID NO: 1928 - RNA, 20 nt, synthetic construct
  source 1..20: mol_type = other RNA
caactgtgggaggaagaaaa

SEQ ID NO: 1929 - RNA, 20 nt, synthetic construct
  source 1..20: mol_type = other RNA
gcctcttactctgtaatcat

SEQ ID NO: 1930 - RNA, 20 nt, synthetic construct
  source 1..20: mol_type = other RNA
tcttactctgtaatcatagg

SEQ ID NO: 1931 - RNA, 20 nt, synthetic construct
  source 1..20: mol_type = other RNA
agagagctggggagaggaga

SEQ ID NO: 1932 - RNA, 20 nt, synthetic construct
  source 1..20: mol_type = other RNA
ctgaacaggaaggagagcca

SEQ ID NO: 1933 - RNA, 20 nt, synthetic construct
  source 1..20: mol_type = other RNA
atggaactgttggaaaaagc

SEQ ID NO: 1934 - RNA, 20 nt, synthetic construct
  source 1..20: mol_type = other RNA
ttgagcagcagaaagaacag

SEQ ID NO: 1935 - RNA, 20 nt, synthetic construct
  source 1..20: mol_type = other RNA
ggagagagcgggaagctaga

SEQ ID NO: 1936 - RNA, 20 nt, synthetic construct
  source 1..20: mol_type = other RNA
ccttcagcagcagctgctcc

SEQ ID NO: 1937 - RNA, 20 nt, synthetic construct
  source 1..20: mol_type = other RNA
ggcactccttggagagggag

SEQ ID NO: 1938 - RNA, 20 nt, synthetic construct
  source 1..20: mol_type = other RNA
ctcccgccatcggcactcct

SEQ ID NO: 1939 - RNA, 20 nt, synthetic construct
  source 1..20: mol_type = other RNA
gaagcccagtctaagcagac

SEQ ID NO: 1940 - RNA, 20 nt, synthetic construct
  source 1..20: mol_type = other RNA
gtcgctacctgtggctccgc

SEQ ID NO: 1941 - RNA, 20 nt, synthetic construct
  source 1..20: mol_type = other RNA
tagaccaagccttttgggta

SEQ ID NO: 1942 - RNA, 20 nt, synthetic construct
  source 1..20: mol_type = other RNA
gggcagcagaatagccaggc

SEQ ID NO: 1943 - RNA, 20 nt, synthetic construct
  source 1..20: mol_type = other RNA
aggcttctgtgggagagagt

SEQ ID NO: 1944 - RNA, 20 nt, synthetic construct
  source 1..20: mol_type = other RNA
tgggtctcagagtggctccg

SEQ ID NO: 1945 - RNA, 20 nt, synthetic construct
  source 1..20: mol_type = other RNA
atgatgctgttgggttcaaa

SEQ ID NO: 1946 - RNA, 20 nt, synthetic construct
  source 1..20: mol_type = other RNA
tgatgctgttgggttcaaaa

SEQ ID NO: 1947 - RNA, 20 nt, synthetic construct
  source 1..20: mol_type = other RNA
atccttacagcaggcttgag

SEQ ID NO: 1948 - RNA, 20 nt, synthetic construct
  source 1..20: mol_type = other RNA
aatccttacagcaggcttga

SEQ ID NO: 1949 - RNA, 20 nt, synthetic construct
  source 1..20: mol_type = other RNA
taggccacagagtgacaccc

SEQ ID NO: 1950 - RNA, 20 nt, synthetic construct
  source 1..20: mol_type = other RNA
ccgaagacgatttcaacaaa

SEQ ID NO: 1951 - RNA, 20 nt, synthetic construct
  source 1..20: mol_type = other RNA
aagcagggatggacaaccgt

SEQ ID NO: 1952 - RNA, 20 nt, synthetic construct
  source 1..20: mol_type = other RNA
tccccagcccattgtctgat

SEQ ID NO: 1953 - RNA, 20 nt, synthetic construct
  source 1..20: mol_type = other RNA
gagatccgatctgtggaaac

SEQ ID NO: 1954 - RNA, 20 nt, synthetic construct
  source 1..20: mol_type = other RNA
cactcaccacacagagccat

SEQ ID NO: 1955 - RNA, 20 nt, synthetic construct
  source 1..20: mol_type = other RNA
ttaccagaacctgtctccag

SEQ ID NO: 1956 - RNA, 20 nt, synthetic construct
  source 1..20: mol_type = other RNA
agcagcactaaggagaaaaa

SEQ ID NO: 1957 - RNA, 20 nt, synthetic construct
  source 1..20: mol_type = other RNA
gcagcactaaggagaaaaaa

SEQ ID NO: 1958 - RNA, 20 nt, synthetic construct
  source 1..20: mol_type = other RNA
aggtcctaggaagcaaatac

SEQ ID NO: 1959 - RNA, 20 nt, synthetic construct
  source 1..20: mol_type = other RNA
ggtcctaggaagcaaataca

SEQ ID NO: 1960 - RNA, 20 nt, synthetic construct
  source 1..20: mol_type = other RNA
cagaatctaaagggcagaag

SEQ ID NO: 1961 - RNA, 20 nt, synthetic construct
  source 1..20: mol_type = other RNA
atccagttcagcatgatctc

SEQ ID NO: 1962 - RNA, 20 nt, synthetic construct
  source 1..20: mol_type = other RNA
aatacctcagttgccggtgc

SEQ ID NO: 1963 - RNA, 20 nt, synthetic construct
  source 1..20: mol_type = other RNA
cccactgaccaaatatcaac

SEQ ID NO: 1964 - RNA, 20 nt, synthetic construct
  source 1..20: mol_type = other RNA
tatctaatggtggaccataa

SEQ ID NO: 1965 - RNA, 20 nt, synthetic construct
  source 1..20: mol_type = other RNA
atatcttagatgcctagtca

SEQ ID NO: 1966 - RNA, 20 nt, synthetic construct
  source 1..20: mol_type = other RNA
cagcagattatgcgtctgac

SEQ ID NO: 1967 - RNA, 20 nt, synthetic construct
  source 1..20: mol_type = other RNA
tttcttgcctgaaaaaacaa

SEQ ID NO: 1968 - RNA, 20 nt, synthetic construct
  source 1..20: mol_type = other RNA
cagctatcagtaccatagac

SEQ ID NO: 1969 - RNA, 20 nt, synthetic construct
  source 1..20: mol_type = other RNA
atgatcagtcctttgaaagc

SEQ ID NO: 1970 - RNA, 20 nt, synthetic construct
  source 1..20: mol_type = other RNA
gtcaggcctagaaattggga

SEQ ID NO: 1971 - RNA, 20 nt, synthetic construct
  source 1..20: mol_type = other RNA
aagtcacctgcagagaagga

SEQ ID NO: 1972 - RNA, 20 nt, synthetic construct
  source 1..20: mol_type = other RNA
agtcacctgcagagaaggat

SEQ ID NO: 1973 - RNA, 20 nt, synthetic construct
  source 1..20: mol_type = other RNA
tgggcccacctcgatgatgt

SEQ ID NO: 1974 - RNA, 20 nt, synthetic construct
  source 1..20: mol_type = other RNA
ggaacagagccccctgctgg

SEQ ID NO: 1975 - RNA, 20 nt, synthetic construct
  source 1..20: mol_type = other RNA
caagtaccgacgcgccagcg

SEQ ID NO: 1976 - RNA, 20 nt, synthetic construct
  source 1..20: mol_type = other RNA
agcgcctggggggaaggggc

SEQ ID NO: 1977 - RNA, 20 nt, synthetic construct
  source 1..20: mol_type = other RNA
aatgatgcagagttatagac

SEQ ID NO: 1978 - RNA, 20 nt, synthetic construct
  source 1..20: mol_type = other RNA
cagttgactagacagaaaga

SEQ ID NO: 1979 - RNA, 20 nt, synthetic construct
  source 1..20: mol_type = other RNA
ttgactagacagaaagatgg

SEQ ID NO: 1980 - RNA, 20 nt, synthetic construct
  source 1..20: mol_type = other RNA
tgactagacagaaagatgga

SEQ ID NO: 1981 - RNA, 20 nt, synthetic construct
  source 1..20: mol_type = other RNA
cccagcagccagcactacag

SEQ ID NO: 1982 - RNA, 20 nt, synthetic construct
  source 1..20: mol_type = other RNA
tgcactcaccaacagggctg

SEQ ID NO: 1983 - RNA, 20 nt, synthetic construct
  source 1..20: mol_type = other RNA
ctcaccaacagggctggggc

SEQ ID NO: 1984 - RNA, 20 nt, synthetic construct
  source 1..20: mol_type = other RNA
acctgcgagtcatcacttcc

SEQ ID NO: 1985 - RNA, 20 nt, synthetic construct
  source 1..20: mol_type = other RNA
ctcacctgtgttgtaggcag

SEQ ID NO: 1986 - RNA, 20 nt, synthetic construct
  source 1..20: mol_type = other RNA
tcacctgtgttgtaggcagt

SEQ ID NO: 1987 - RNA, 20 nt, synthetic construct
  source 1..20: mol_type = other RNA
acctcagcaacagtcccacc

SEQ ID NO: 1988 - RNA, 20 nt, synthetic construct
  source 1..20: mol_type = other RNA
cccgggctggaggcaggcaa

SEQ ID NO: 1989 - RNA, 20 nt, synthetic construct
  source 1..20: mol_type = other RNA
atgtctgtgaagagaggaga

SEQ ID NO: 1990 - RNA, 20 nt, synthetic construct
  source 1..20: mol_type = other RNA
tttgcagcgcattggcaagt

SEQ ID NO: 1991 - RNA, 20 nt, synthetic construct
  source 1..20: mol_type = other RNA
tccggcgaatggctgacgca

SEQ ID NO: 1992 - RNA, 20 nt, synthetic construct
  source 1..20: mol_type = other RNA
cgaggacctggaaaacaaag

SEQ ID NO: 1993 - RNA, 20 nt, synthetic construct
  source 1..20: mol_type = other RNA
cacttactggtaatgaaccc

SEQ ID NO: 1994 - RNA, 20 nt, synthetic construct
  source 1..20: mol_type = other RNA
ctccgagtccttgattcatt

SEQ ID NO: 1995 - RNA, 20 nt, synthetic construct
  source 1..20: mol_type = other RNA
cagattccattttccccaag

SEQ ID NO: 1996 - RNA, 20 nt, synthetic construct
  source 1..20: mol_type = other RNA
tcagattccattttccccaa

SEQ ID NO: 1997 - RNA, 20 nt, synthetic construct
  source 1..20: mol_type = other RNA
gaaggccatgcctggaacac

SEQ ID NO: 1998 - RNA, 20 nt, synthetic construct
  source 1..20: mol_type = other RNA
ttaccttggtttctcgaaga

SEQ ID NO: 1999 - RNA, 20 nt, synthetic construct
  source 1..20: mol_type = other RNA
atgcttacctctctcagagt

SEQ ID NO: 2000 - RNA, 20 nt, synthetic construct
  source 1..20: mol_type = other RNA
caacaatcaggaggaagtag

SEQ ID NO: 2001 - RNA, 20 nt, synthetic construct
  source 1..20: mol_type = other RNA
gtggccacatcacttgccca

SEQ ID NO: 2002 - RNA, 20 nt, synthetic construct
  source 1..20: mol_type = other RNA
gcccgggcagtcctgcaagc

SEQ ID NO: 2003 - RNA, 20 nt, synthetic construct
  source 1..20: mol_type = other RNA
gtacctgaagaggaagagaa

SEQ ID NO: 2004 - RNA, 20 nt, synthetic construct
  source 1..20: mol_type = other RNA
ccctgccgggacttcatcaa

SEQ ID NO: 2005 - RNA, 20 nt, synthetic construct
  source 1..20: mol_type = other RNA
ttaccatggcatcgtagcgc

SEQ ID NO: 2006 - RNA, 20 nt, synthetic construct
  source 1..20: mol_type = other RNA
aggccacagcaccgcgccca

SEQ ID NO: 2007 - RNA, 20 nt, synthetic construct
  source 1..20: mol_type = other RNA
cgctcagaaagtgaggggtg

SEQ ID NO: 2008 - RNA, 20 nt, synthetic construct
  source 1..20: mol_type = other RNA
gtagtccaggcctatgcttt

SEQ ID NO: 2009 - RNA, 20 nt, synthetic construct
  source 1..20: mol_type = other RNA
gatctagaagaaagaaaaga

SEQ ID NO: 2010 - RNA, 20 nt, synthetic construct
  source 1..20: mol_type = other RNA
ttaccattgcatcacaaatc

SEQ ID NO: 2011 - RNA, 20 nt, synthetic construct
  source 1..20: mol_type = other RNA
gtgacttaccgcccacctgc

SEQ ID NO: 2012 - RNA, 20 nt, synthetic construct
  source 1..20: mol_type = other RNA
ctcccaggtaattgtgcctg

SEQ ID NO: 2013 - RNA, 20 nt, synthetic construct
  source 1..20: mol_type = other RNA
aggtgaccaagatatcaacg

SEQ ID NO: 2014 - RNA, 20 nt, synthetic construct
  source 1..20: mol_type = other RNA
ggtcggatcaagttttccac

SEQ ID NO: 2015 - RNA, 20 nt, synthetic construct
  source 1..20: mol_type = other RNA
ttatcatcctgaaacaagag

SEQ ID NO: 2016 - RNA, 20 nt, synthetic construct
  source 1..20: mol_type = other RNA
ttcagtctgaaaaagaagag

SEQ ID NO: 2017 - RNA, 20 nt, synthetic construct
  source 1..20: mol_type = other RNA
aaggaacagacgggctctga

SEQ ID NO: 2018 - RNA, 20 nt, synthetic construct
  source 1..20: mol_type = other RNA
gaaattaccttttgcagaag

SEQ ID NO: 2019 - RNA, 20 nt, synthetic construct
  source 1..20: mol_type = other RNA
agaaattaccttttgcagaa

SEQ ID NO: 2020 - RNA, 20 nt, synthetic construct
  source 1..20: mol_type = other RNA
gttgcctgagaaagaaaaag

SEQ ID NO: 2021 - RNA, 20 nt, synthetic construct
  source 1..20: mol_type = other RNA
ctctcccaggcacaagacac

SEQ ID NO: 2022 - RNA, 20 nt, synthetic construct
  source 1..20: mol_type = other RNA
ccgccatgccggccgcgctg

SEQ ID NO: 2023 - RNA, 20 nt, synthetic construct
  source 1..20: mol_type = other RNA
gaagtgaccaagttcactcc

SEQ ID NO: 2024 - RNA, 20 nt, synthetic construct
  source 1..20: mol_type = other RNA
caatccacctgaaagataaa

SEQ ID NO: 2025 - RNA, 20 nt, synthetic construct
  source 1..20: mol_type = other RNA
aatccacctgaaagataaaa

SEQ ID NO: 2026 - RNA, 20 nt, synthetic construct
  source 1..20: mol_type = other RNA
gttatttcagatattcagcc

SEQ ID NO: 2027 - RNA, 20 nt, synthetic construct
  source 1..20: mol_type = other RNA
tgttttcacaaggttgtaat

SEQ ID NO: 2028 - RNA, 20 nt, synthetic construct
  source 1..20: mol_type = other RNA
tggattcagcagtacagttt

SEQ ID NO: 2029 - RNA, 20 nt, synthetic construct
  source 1..20: mol_type = other RNA
aaaacacaggtaagtgtttg

SEQ ID NO: 2030 - RNA, 20 nt, synthetic construct
  source 1..20: mol_type = other RNA
aaacacaggtaagtgtttgc

SEQ ID NO: 2031 - RNA, 20 nt, synthetic construct
  source 1..20: mol_type = other RNA
aacacaggtaagtgtttgcg

SEQ ID NO: 2032 - RNA, 20 nt, synthetic construct
  source 1..20: mol_type = other RNA
tgaacaaatgaagactaaaa

SEQ ID NO: 2033 - RNA, 20 nt, synthetic construct
  source 1..20: mol_type = other RNA
actagagcaggtaaccgggg

SEQ ID NO: 2034 - RNA, 20 nt, synthetic construct
  source 1..20: mol_type = other RNA
atctccggccagtccctgag

SEQ ID NO: 2035 - RNA, 20 nt, synthetic construct
  source 1..20: mol_type = other RNA
gacagatgcagatcaccctg

SEQ ID NO: 2036 - RNA, 20 nt, synthetic construct
  source 1..20: mol_type = other RNA
aggaagtccagacatcggcc

SEQ ID NO: 2037 - RNA, 20 nt, synthetic construct
  source 1..20: mol_type = other RNA
tggattcccaggacagcaca

SEQ ID NO: 2038 - RNA, 20 nt, synthetic construct
  source 1..20: mol_type = other RNA
gcccaccttgttagtttcac

SEQ ID NO: 2039 - RNA, 20 nt, synthetic construct
  source 1..20: mol_type = other RNA
aaaccttcaggagaaggaag

SEQ ID NO: 2040 - RNA, 20 nt, synthetic construct
  source 1..20: mol_type = other RNA
gctgagatctaggagacaaa

SEQ ID NO: 2041 - RNA, 20 nt, synthetic construct
  source 1..20: mol_type = other RNA
gatacagactctcaacagag

SEQ ID NO: 2042 - RNA, 20 nt, synthetic construct
  source 1..20: mol_type = other RNA
ccattcaaggggacccacag

SEQ ID NO: 2043 - RNA, 20 nt, synthetic construct
  source 1..20: mol_type = other RNA
ggggcagtcgcttacagttc

SEQ ID NO: 2044 - RNA, 20 nt, synthetic construct
  source 1..20: mol_type = other RNA
acttaccctctgacttcata

SEQ ID NO: 2045 - RNA, 20 nt, synthetic construct
  source 1..20: mol_type = other RNA
acagagcaaaaaatgaccag

SEQ ID NO: 2046 - RNA, 20 nt, synthetic construct
  source 1..20: mol_type = other RNA
ttacctgtttctccagtagt

SEQ ID NO: 2047 - RNA, 20 nt, synthetic construct
  source 1..20: mol_type = other RNA
acgcctacaattggaaaaca

SEQ ID NO: 2048 - RNA, 20 nt, synthetic construct
  source 1..20: mol_type = other RNA
cgcctacaattggaaaacaa

SEQ ID NO: 2049 - RNA, 20 nt, synthetic construct
  source 1..20: mol_type = other RNA
ttcctgcaggattactttga

SEQ ID NO: 2050 - RNA, 20 nt, synthetic construct
  source 1..20: mol_type = other RNA
tgctgagctgttaataaaac

SEQ ID NO: 2051 - RNA, 20 nt, synthetic construct
  source 1..20: mol_type = other RNA
tcacttacttcatatttctt

SEQ ID NO: 2052 - RNA, 20 nt, synthetic construct
  source 1..20: mol_type = other RNA
ccagccgcagcccctaagtc

SEQ ID NO: 2053 - RNA, 20 nt, synthetic construct
  source 1..20: mol_type = other RNA
tggccgggccaggatgggag

SEQ ID NO: 2054 - RNA, 20 nt, synthetic construct
  source 1..20: mol_type = other RNA
acgggcagctagtgagccag

SEQ ID NO: 2055 - RNA, 20 nt, synthetic construct
  source 1..20: mol_type = other RNA
cgggcagctagtgagccaga

SEQ ID NO: 2056 - RNA, 20 nt, synthetic construct
  source 1..20: mol_type = other RNA
ggcctggcagggatggaggg

SEQ ID NO: 2057 - RNA, 20 nt, synthetic construct
  source 1..20: mol_type = other RNA
catggcctggcagggatgga

SEQ ID NO: 2058 - RNA, 20 nt, synthetic construct
  source 1..20: mol_type = other RNA
ccatggcctggcagggatgg

SEQ ID NO: 2059 - RNA, 20 nt, synthetic construct
  source 1..20: mol_type = other RNA
taacgtcccagttctgattc

SEQ ID NO: 2060 - RNA, 20 nt, synthetic construct
  source 1..20: mol_type = other RNA
gaatcagaactgggacgtta

SEQ ID NO: 2061 - RNA, 20 nt, synthetic construct
  source 1..20: mol_type = other RNA
tgcacctgggggcaggccaa

SEQ ID NO: 2062 - RNA, 20 nt, synthetic construct
  source 1..20: mol_type = other RNA
tcatacctggtggcataggc

SEQ ID NO: 2063 - RNA, 20 nt, synthetic construct
  source 1..20: mol_type = other RNA
cctgctgcagatcttccctg

SEQ ID NO: 2064 - RNA, 20 nt, synthetic construct
  source 1..20: mol_type = other RNA
tacctggagaccagggtggt

SEQ ID NO: 2065 - RNA, 20 nt, synthetic construct
  source 1..20: mol_type = other RNA
ggcgtacctggagaccaggg

SEQ ID NO: 2066 - RNA, 20 nt, synthetic construct
  source 1..20: mol_type = other RNA
cctgatgctgggggtgagag

SEQ ID NO: 2067 - RNA, 20 nt, synthetic construct
  source 1..20: mol_type = other RNA
tcctgatgctgggggtgaga

SEQ ID NO: 2068 - RNA, 20 nt, synthetic construct
  source 1..20: mol_type = other RNA
cggcagtactgcgagctgtg

SEQ ID NO: 2069 - RNA, 20 nt, synthetic construct
  source 1..20: mol_type = other RNA
cggacagcagatcggcgacg

SEQ ID NO: 2070 - RNA, 20 nt, synthetic construct
  source 1..20: mol_type = other RNA
gcttcttccagtcctgacgc

SEQ ID NO: 2071 - RNA, 20 nt, synthetic construct
  source 1..20: mol_type = other RNA
tactaccttgtagcatatgc

SEQ ID NO: 2072 - RNA, 20 nt, synthetic construct
  source 1..20: mol_type = other RNA
atacttcgaatttttccaga

SEQ ID NO: 2073 - RNA, 20 nt, synthetic construct
  source 1..20: mol_type = other RNA
gtcaagcagctgcactgcac

SEQ ID NO: 2074 - RNA, 20 nt, synthetic construct
  source 1..20: mol_type = other RNA
tcaagcagctgcactgcacc

SEQ ID NO: 2075 - RNA, 20 nt, synthetic construct
  source 1..20: mol_type = other RNA
caagcagctgcactgcaccg

SEQ ID NO: 2076 - RNA, 20 nt, synthetic construct
  source 1..20: mol_type = other RNA
gtagctgaaagacacaaaga

SEQ ID NO: 2077 - RNA, 20 nt, synthetic construct
  source 1..20: mol_type = other RNA
tagctgaaagacacaaagaa

SEQ ID NO: 2078 - RNA, 20 nt, synthetic construct
  source 1..20: mol_type = other RNA
ctattacctggttgcgtaag

SEQ ID NO: 2079 - RNA, 20 nt, synthetic construct
  source 1..20: mol_type = other RNA
tattacctggttgcgtaaga

SEQ ID NO: 2080 - RNA, 20 nt, synthetic construct
  source 1..20: mol_type = other RNA
atcctgcggatatttccaga

SEQ ID NO: 2081 - RNA, 20 nt, synthetic construct
  source 1..20: mol_type = other RNA
tcctgcggatatttccagag

SEQ ID NO: 2082 - RNA, 20 nt, synthetic construct
  source 1..20: mol_type = other RNA
tccctgggttggggacagaa

SEQ ID NO: 2083 - RNA, 20 nt, synthetic construct
  source 1..20: mol_type = other RNA
atacctgcttgatggtgctg

SEQ ID NO: 2084 - RNA, 20 nt, synthetic construct
  source 1..20: mol_type = other RNA
ccttggtccagaattccatg

SEQ ID NO: 2085 - RNA, 20 nt, synthetic construct
  source 1..20: mol_type = other RNA
gcagctggagggacagtcac

SEQ ID NO: 2086 - RNA, 20 nt, synthetic construct
  source 1..20: mol_type = other RNA
gcggtgccacagcagctgga

SEQ ID NO: 2087 - RNA, 20 nt, synthetic construct
  source 1..20: mol_type = other RNA
cgcggtgccacagcagctgg

SEQ ID NO: 2088 - RNA, 20 nt, synthetic construct
  source 1..20: mol_type = other RNA
ggcccccaggtttgagccga

SEQ ID NO: 2089 - RNA, 20 nt, synthetic construct
  source 1..20: mol_type = other RNA
aggcccccaggtttgagccg

SEQ ID NO: 2090 - RNA, 20 nt, synthetic construct
  source 1..20: mol_type = other RNA
ctctcctgtggggaggaggg

SEQ ID NO: 2091 - RNA, 20 nt, synthetic construct
  source 1..20: mol_type = other RNA
aagctctcctgtggggagga

SEQ ID NO: 2092 - RNA, 20 nt, synthetic construct
  source 1..20: mol_type = other RNA
ctcacctggaactggcagag

SEQ ID NO: 2093 - RNA, 20 nt, synthetic construct
  source 1..20: mol_type = other RNA
tcacctggaactggcagagc

SEQ ID NO: 2094 - RNA, 20 nt, synthetic construct
  source 1..20: mol_type = other RNA
gatgtactgagacggggtgc

SEQ ID NO: 2095 - RNA, 20 nt, synthetic construct
  source 1..20: mol_type = other RNA
atgtactgagacggggtgca

SEQ ID NO: 2096 - RNA, 20 nt, synthetic construct
  source 1..20: mol_type = other RNA
tctcaccttcttcgcaggaa

SEQ ID NO: 2097 - RNA, 20 nt, synthetic construct
  source 1..20: mol_type = other RNA
ctcaccttcttcgcaggaat

SEQ ID NO: 2098 - RNA, 20 nt, synthetic construct
  source 1..20: mol_type = other RNA
aggctgggggccggggaagc

SEQ ID NO: 2099 - RNA, 20 nt, synthetic construct
  source 1..20: mol_type = other RNA
ccccaccttcatccgctcgt

SEQ ID NO: 2100 - RNA, 20 nt, synthetic construct
  source 1..20: mol_type = other RNA
caccagctgtagaaggtgcc

SEQ ID NO: 2101 - RNA, 20 nt, synthetic construct
  source 1..20: mol_type = other RNA
ccaccagctgtagaaggtgc

SEQ ID NO: 2102 - RNA, 20 nt, synthetic construct
  source 1..20: mol_type = other RNA
gtgcaggccgggcttttcca

SEQ ID NO: 2103 - RNA, 20 nt, synthetic construct
  source 1..20: mol_type = other RNA
gtcctgcagaaggacagggc

SEQ ID NO: 2104 - RNA, 20 nt, synthetic construct
  source 1..20: mol_type = other RNA
ggcagtcctgcagaaggaca

SEQ ID NO: 2105 - RNA, 20 nt, synthetic construct
  source 1..20: mol_type = other RNA
gggcagtcctgcagaaggac

SEQ ID NO: 2106 - RNA, 20 nt, synthetic construct
  source 1..20: mol_type = other RNA
caaggaccagcttaagaccg

SEQ ID NO: 2107 - RNA, 20 nt, synthetic construct
  source 1..20: mol_type = other RNA
acaaggaccagcttaagacc

SEQ ID NO: 2108 - RNA, 20 nt, synthetic construct
  source 1..20: mol_type = other RNA
cactgaccttctccagggcg

SEQ ID NO: 2109 - RNA, 20 nt, synthetic construct
  source 1..20: mol_type = other RNA
ccactgaccttctccagggc

SEQ ID NO: 2110 - RNA, 20 nt, synthetic construct
  source 1..20: mol_type = other RNA
aggcgcatccacagcagctc

SEQ ID NO: 2111 - RNA, 20 nt, synthetic construct
  source 1..20: mol_type = other RNA
tttgttgcagatcttggagc

SEQ ID NO: 2112 - RNA, 20 nt, synthetic construct
  source 1..20: mol_type = other RNA
tgttgcagatcttggagctg

SEQ ID NO: 2113 - RNA, 20 nt, synthetic construct
  source 1..20: mol_type = other RNA
ttgttgcagatcttggagct

SEQ ID NO: 2114 - RNA, 20 nt, synthetic construct
  source 1..20: mol_type = other RNA
agctgctgaggggtgtgggc

SEQ ID NO: 2115 - RNA, 20 nt, synthetic construct
  source 1..20: mol_type = other RNA
ctgcagctgctgaggggtgt

SEQ ID NO: 2116 - RNA, 20 nt, synthetic construct
  source 1..20: mol_type = other RNA
gctgcagctgctgaggggtg

SEQ ID NO: 2117 - RNA, 20 nt, synthetic construct
  source 1..20: mol_type = other RNA
tgtggcccaggtgggtgggg

SEQ ID NO: 2118 - RNA, 20 nt, synthetic construct
  source 1..20: mol_type = other RNA
agagcatctggggggagccg

SEQ ID NO: 2119 - RNA, 20 nt, synthetic construct
  source 1..20: mol_type = other RNA
atcgtccctgcagggaagga

SEQ ID NO: 2120 - RNA, 20 nt, synthetic construct
  source 1..20: mol_type = other RNA
gctaccggaggtgccagaaa

SEQ ID NO: 2121 - RNA, 20 nt, synthetic construct
  source 1..20: mol_type = other RNA
ggagctggaaggtgaaggga

SEQ ID NO: 2122 - RNA, 20 nt, synthetic construct
  source 1..20: mol_type = other RNA
cggagctggaaggtgaaggg

SEQ ID NO: 2123 - RNA, 20 nt, synthetic construct
  source 1..20: mol_type = other RNA
tctcggagctggaaggtgaa

SEQ ID NO: 2124 - RNA, 20 nt, synthetic construct
  source 1..20: mol_type = other RNA
gatgaagcaggtgaggccca

SEQ ID NO: 2125 - RNA, 20 nt, synthetic construct
  source 1..20: mol_type = other RNA
cccctggtgggcagatggga

SEQ ID NO: 2126 - RNA, 20 nt, synthetic construct
  source 1..20: mol_type = other RNA
ccccctggtgggcagatggg

SEQ ID NO: 2127 - RNA, 20 nt, synthetic construct
  source 1..20: mol_type = other RNA
cttccccctggtgggcagat

SEQ ID NO: 2128 - RNA, 20 nt, synthetic construct
  source 1..20: mol_type = other RNA
gcttccccctggtgggcaga

SEQ ID NO: 2129 - RNA, 20 nt, synthetic construct
  source 1..20: mol_type = other RNA
ctcaccagacttcagccagc

SEQ ID NO: 2130 - RNA, 20 nt, synthetic construct
  source 1..20: mol_type = other RNA
tcaccagacttcagccagca

SEQ ID NO: 2131 - RNA, 20 nt, synthetic construct
  source 1..20: mol_type = other RNA
acgctgccaggccagagagc

SEQ ID NO: 2132 - RNA, 20 nt, synthetic construct
  source 1..20: mol_type = other RNA
cacgctgccaggccagagag

SEQ ID NO: 2133 - RNA, 20 nt, synthetic construct
  source 1..20: mol_type = other RNA
gatccacaggggcttcatct

SEQ ID NO: 2134 - RNA, 20 nt, synthetic construct
  source 1..20: mol_type = other RNA
ggtctgtgccaccggccggt

SEQ ID NO: 2135 - RNA, 20 nt, synthetic construct
  source 1..20: mol_type = other RNA
aggtctgtgccaccggccgg

SEQ ID NO: 2136 - RNA, 20 nt, synthetic construct
  source 1..20: mol_type = other RNA
cggaggtctgtgccaccggc

SEQ ID NO: 2137 - RNA, 20 nt, synthetic construct
  source 1..20: mol_type = other RNA
cctgcagatgatccagctca

SEQ ID NO: 2138 - RNA, 20 nt, synthetic construct
  source 1..20: mol_type = other RNA
atcctaggcaagggggaaga

SEQ ID NO: 2139 - RNA, 20 nt, synthetic construct
  source 1..20: mol_type = other RNA
catcctaggcaagggggaag

SEQ ID NO: 2140 - RNA, 20 nt, synthetic construct
  source 1..20: mol_type = other RNA
cctgtacctgcccactctct

SEQ ID NO: 2141 - RNA, 20 nt, synthetic construct
  source 1..20: mol_type = other RNA
gagtgggcaggtacaggggc

SEQ ID NO: 2142 - RNA, 20 nt, synthetic construct
  source 1..20: mol_type = other RNA
aacagctgaggggaggggag

SEQ ID NO: 2143 - RNA, 20 nt, synthetic construct
  source 1..20: mol_type = other RNA
aacctgcaggtaggggacag

SEQ ID NO: 2144 - RNA, 20 nt, synthetic construct
  source 1..20: mol_type = other RNA
gtcctgcaaacaaatcacag

SEQ ID NO: 2145 - RNA, 20 nt, synthetic construct
  source 1..20: mol_type = other RNA
ggttttccagctctcacgga

SEQ ID NO: 2146 - RNA, 20 nt, synthetic construct
  source 1..20: mol_type = other RNA
tggttttccagctctcacgg

SEQ ID NO: 2147 - RNA, 20 nt, synthetic construct
  source 1..20: mol_type = other RNA
ggagaacagcagcctttgag

SEQ ID NO: 2148 - RNA, 20 nt, synthetic construct
  source 1..20: mol_type = other RNA
ctggtccaacttccactcaa

SEQ ID NO: 2149 - RNA, 20 nt, synthetic construct
  source 1..20: mol_type = other RNA
ctggcatccagtattgtttc

SEQ ID NO: 2150 - RNA, 20 nt, synthetic construct
  source 1..20: mol_type = other RNA
aatcaaactataaagaaaat

SEQ ID NO: 2151 - RNA, 20 nt, synthetic construct
  source 1..20: mol_type = other RNA
tcagtttacctatttcgagc

SEQ ID NO: 2152 - RNA, 20 nt, synthetic construct
  source 1..20: mol_type = other RNA
gtgtgcagttaaaagacctg

SEQ ID NO: 2153 - RNA, 20 nt, synthetic construct
  source 1..20: mol_type = other RNA
agggcacaagctatagcaat

SEQ ID NO: 2154 - RNA, 20 nt, synthetic construct
  source 1..20: mol_type = other RNA
tactctgaaaggatgaagac

SEQ ID NO: 2155 - RNA, 20 nt, synthetic construct
  source 1..20: mol_type = other RNA
acagaacagatagctgaaga

SEQ ID NO: 2156 - RNA, 20 nt, synthetic construct
  source 1..20: mol_type = other RNA
aatcttttagtgttgggaag

SEQ ID NO: 2157 - RNA, 20 nt, synthetic construct
  source 1..20: mol_type = other RNA
gaatcttttagtgttgggaa

SEQ ID NO: 2158 - RNA, 20 nt, synthetic construct
  source 1..20: mol_type = other RNA
agaatcttttagtgttggga

SEQ ID NO: 2159 - RNA, 20 nt, synthetic construct
  source 1..20: mol_type = other RNA
ctcctacctttttggtcagc

SEQ ID NO: 2160 - RNA, 20 nt, synthetic construct
  source 1..20: mol_type = other RNA
tcctacctttttggtcagca

SEQ ID NO: 2161 - RNA, 20 nt, synthetic construct
  source 1..20: mol_type = other RNA
gccttacagcaacctctcca

SEQ ID NO: 2162 - RNA, 20 nt, synthetic construct
  source 1..20: mol_type = other RNA
attcttacctgaagcacaat

SEQ ID NO: 2163 - RNA, 20 nt, synthetic construct
  source 1..20: mol_type = other RNA
aagcgtgtctggggaaaaag

SEQ ID NO: 2164 - RNA, 20 nt, synthetic construct
  source 1..20: mol_type = other RNA
gaatcgctagggtttggagg

SEQ ID NO: 2165 - RNA, 20 nt, synthetic construct
  source 1..20: mol_type = other RNA
cgaatcgctagggtttggag

SEQ ID NO: 2166 - RNA, 20 nt, synthetic construct
  source 1..20: mol_type = other RNA
acgaatcgctagggtttgga

SEQ ID NO: 2167 - RNA, 20 nt, synthetic construct
  source 1..20: mol_type = other RNA
aacacctactggattgttac

SEQ ID NO: 2168 - RNA, 20 nt, synthetic construct
  source 1..20: mol_type = other RNA
tggcatccagaacaaggagg

SEQ ID NO: 2169 - RNA, 20 nt, synthetic construct
  source 1..20: mol_type = other RNA
catccagaacaaggaggcgg

SEQ ID NO: 2170 - RNA, 20 nt, synthetic construct
  source 1..20: mol_type = other RNA
cgctactgcaggagatctac

SEQ ID NO: 2171 - RNA, 20 nt, synthetic construct
  source 1..20: mol_type = other RNA
ggtgcagatcatcaagaaga

SEQ ID NO: 2172 - RNA, 20 nt, synthetic construct
  source 1..20: mol_type = other RNA
ccacctgcagagcaaccacc

SEQ ID NO: 2173 - RNA, 20 nt, synthetic construct
  source 1..20: mol_type = other RNA
tcacctgtgtagctgctgga

SEQ ID NO: 2174 - RNA, 20 nt, synthetic construct
  source 1..20: mol_type = other RNA
ctcctcacctgtgtagctgc

SEQ ID NO: 2175 - RNA, 20 nt, synthetic construct
  source 1..20: mol_type = other RNA
gccacaggaggaagcccctg

SEQ ID NO: 2176 - RNA, 20 nt, synthetic construct
  source 1..20: mol_type = other RNA
agaggtctgcggacacacga

SEQ ID NO: 2177 - RNA, 20 nt, synthetic construct
  source 1..20: mol_type = other RNA
caactgcagatgggctgtga

SEQ ID NO: 2178 - RNA, 20 nt, synthetic construct
  source 1..20: mol_type = other RNA
aactgcagatgggctgtgac

SEQ ID NO: 2179 - RNA, 20 nt, synthetic construct
  source 1..20: mol_type = other RNA
agccctgaagcaccaagaac

SEQ ID NO: 2180 - RNA, 20 nt, synthetic construct
  source 1..20: mol_type = other RNA
cttccagaagtgcctggcac

SEQ ID NO: 2181 - RNA, 20 nt, synthetic construct
  source 1..20: mol_type = other RNA
ggatagctgcacagggaagg

SEQ ID NO: 2182 - RNA, 20 nt, synthetic construct
  source 1..20: mol_type = other RNA
cggatagctgcacagggaag

SEQ ID NO: 2183 - RNA, 20 nt, synthetic construct
  source 1..20: mol_type = other RNA
acggatagctgcacagggaa

SEQ ID NO: 2184 - RNA, 20 nt, synthetic construct
  source 1..20: mol_type = other RNA
aacactcaccgccgtgtggc

SEQ ID NO: 2185 - RNA, 20 nt, synthetic construct
  source 1..20: mol_type = other RNA
ctcacctccacacagaatga

SEQ ID NO: 2186 - RNA, 20 nt, synthetic construct
  source 1..20: mol_type = other RNA
gtggcaggcagagaaggggc

SEQ ID NO: 2187 - RNA, 20 nt, synthetic construct
  source 1..20: mol_type = other RNA
ggccggtctgtggggacaca

SEQ ID NO: 2188 - RNA, 20 nt, synthetic construct
  source 1..20: mol_type = other RNA
tggccggtctgtggggacac

SEQ ID NO: 2189 - RNA, 20 nt, synthetic construct
  source 1..20: mol_type = other RNA
cagcttggggaagaggtact

SEQ ID NO: 2190 - RNA, 20 nt, synthetic construct
  source 1..20: mol_type = other RNA
gcagcttggggaagaggtac

SEQ ID NO: 2191 - RNA, 20 nt, synthetic construct
  source 1..20: mol_type = other RNA
tctgctccaggagatctaca

SEQ ID NO: 2192 - RNA, 20 nt, synthetic construct
  source 1..20: mol_type = other RNA
ggtcatggccgccagaccct

SEQ ID NO: 2193 - RNA, 20 nt, synthetic construct
  source 1..20: mol_type = other RNA
gtccagtgtcccagaatgcc

SEQ ID NO: 2194 - RNA, 20 nt, synthetic construct
  source 1..20: mol_type = other RNA
aatcacctctgaacaatccc

SEQ ID NO: 2195 - RNA, 20 nt, synthetic construct
  source 1..20: mol_type = other RNA
cagcctggaagagaaaggaa

SEQ ID NO: 2196 - RNA, 20 nt, synthetic construct
  source 1..20: mol_type = other RNA
gcttacctcttcactgttgg

SEQ ID NO: 2197 - RNA, 20 nt, synthetic construct
  source 1..20: mol_type = other RNA
gaggcttacctcttcactgt

SEQ ID NO: 2198 - RNA, 20 nt, synthetic construct
  source 1..20: mol_type = other RNA
ttgtgctgaaataaagaaaa

SEQ ID NO: 2199 - RNA, 20 nt, synthetic construct
  source 1..20: mol_type = other RNA
tgtgctgaaataaagaaaaa

SEQ ID NO: 2200 - RNA, 20 nt, synthetic construct
  source 1..20: mol_type = other RNA
gtgctgaaataaagaaaaag

SEQ ID NO: 2201 - RNA, 20 nt, synthetic construct
  source 1..20: mol_type = other RNA
ctaccttcagattggagagc

SEQ ID NO: 2202 - RNA, 20 nt, synthetic construct
  source 1..20: mol_type = other RNA
ttgcaaagaaacatggggaa

SEQ ID NO: 2203 - RNA, 20 nt, synthetic construct
  source 1..20: mol_type = other RNA
tgaccgacattccatggcca

SEQ ID NO: 2204 - RNA, 20 nt, synthetic construct
  source 1..20: mol_type = other RNA
tttcactgaaagggagagag

SEQ ID NO: 2205 - RNA, 20 nt, synthetic construct
  source 1..20: mol_type = other RNA
ctttcactgaaagggagaga

SEQ ID NO: 2206 - RNA, 20 nt, synthetic construct
  source 1..20: mol_type = other RNA
tctttcactgaaagggagag

SEQ ID NO: 2207 - RNA, 20 nt, synthetic construct
  source 1..20: mol_type = other RNA
tgttctgtgggcagaggggt

SEQ ID NO: 2208 - RNA, 20 nt, synthetic construct
  source 1..20: mol_type = other RNA
gctgtgttctgtgggcagag

SEQ ID NO: 2209 - RNA, 20 nt, synthetic construct
  source 1..20: mol_type = other RNA
acctcaccttctgtttgtcg

SEQ ID NO: 2210 - RNA, 20 nt, synthetic construct
  source 1..20: mol_type = other RNA
ccacctgggaagggaaggag

SEQ ID NO: 2211 - RNA, 20 nt, synthetic construct
  source 1..20: mol_type = other RNA
accacctgggaagggaagga

SEQ ID NO: 2212 - RNA, 20 nt, synthetic construct
  source 1..20: mol_type = other RNA
caccacctgggaagggaagg

SEQ ID NO: 2213 - RNA, 20 nt, synthetic construct
  source 1..20: mol_type = other RNA
gtcctgtgggaagcagtggc

SEQ ID NO: 2214 - RNA, 20 nt, synthetic construct
  source 1..20: mol_type = other RNA
agttgtcctgtgggaagcag

SEQ ID NO: 2215 - RNA, 20 nt, synthetic construct
  source 1..20: mol_type = other RNA
ctcactgatggggacaaatg

SEQ ID NO: 2216 - RNA, 20 nt, synthetic construct
  source 1..20: mol_type = other RNA
gctcactgatggggacaaat

SEQ ID NO: 2217 - RNA, 20 nt, synthetic construct
  source 1..20: mol_type = other RNA
ggctcactgatggggacaaa

SEQ ID NO: 2218 - RNA, 20 nt, synthetic construct
  source 1..20: mol_type = other RNA
gcacctgaatgtagccctgc

SEQ ID NO: 2219 - RNA, 20 nt, synthetic construct
  source 1..20: mol_type = other RNA
tcacctgtgggcacaagaac

SEQ ID NO: 2220 - RNA, 20 nt, synthetic construct
  source 1..20: mol_type = other RNA
agccctggagcaagatgggg

SEQ ID NO: 2221 - RNA, 20 nt, synthetic construct
  source 1..20: mol_type = other RNA
tagccctggagcaagatggg

SEQ ID NO: 2222 - RNA, 20 nt, synthetic construct
  source 1..20: mol_type = other RNA
gtagccctggagcaagatgg

SEQ ID NO: 2223 - RNA, 20 nt, synthetic construct
  source 1..20: mol_type = other RNA
tgtagccctggagcaagatg

SEQ ID NO: 2224 - RNA, 20 nt, synthetic construct
  source 1..20: mol_type = other RNA
ttgtagccctggagcaagat

SEQ ID NO: 2225 - RNA, 20 nt, synthetic construct
  source 1..20: mol_type = other RNA
cacctggaggaaggggtaca

SEQ ID NO: 2226 - RNA, 20 nt, synthetic construct
  source 1..20: mol_type = other RNA
gcccaccttcctctggtaga

SEQ ID NO: 2227 - RNA, 20 nt, synthetic construct
  source 1..20: mol_type = other RNA
ggagcgggggggagaagcgg

SEQ ID NO: 2228 - RNA, 20 nt, synthetic construct
  source 1..20: mol_type = other RNA
aaacaaaaggagatatcaag

SEQ ID NO: 2229 - RNA, 20 nt, synthetic construct
  source 1..20: mol_type = other RNA
atatctgagtactttagtta

SEQ ID NO: 2230 - RNA, 20 nt, synthetic construct
  source 1..20: mol_type = other RNA
cctacctctgcaattaaatt

SEQ ID NO: 2231 - RNA, 20 nt, synthetic construct
  source 1..20: mol_type = other RNA
ataacttacctttttgtctc

SEQ ID NO: 2232 - RNA, 20 nt, synthetic construct
  source 1..20: mol_type = other RNA
tcgctggcagccgctgtact

SEQ ID NO: 2233 - RNA, 20 nt, synthetic construct
  source 1..20: mol_type = other RNA
actctaaaaagtgaaaatca

SEQ ID NO: 2234 - RNA, 20 nt, synthetic construct
  source 1..20: mol_type = other RNA
aggtgcagcagatgaaacag

SEQ ID NO: 2235 - RNA, 20 nt, synthetic construct
  source 1..20: mol_type = other RNA
accacctgggcggcccaggc

SEQ ID NO: 2236 - RNA, 20 nt, synthetic construct
  source 1..20: mol_type = other RNA
ccacctgggcggcccaggca

SEQ ID NO: 2237 - RNA, 20 nt, synthetic construct
  source 1..20: mol_type = other RNA
cccccaccctgcagggcacc

SEQ ID NO: 2238 - RNA, 20 nt, synthetic construct
  source 1..20: mol_type = other RNA
ccaccctgcagggcaccagg

SEQ ID NO: 2239 - RNA, 20 nt, synthetic construct
  source 1..20: mol_type = other RNA
agccctcacctctcactagt

SEQ ID NO: 2240 - RNA, 20 nt, synthetic construct
  source 1..20: mol_type = other RNA
cacctagagaaggcagcgtc

SEQ ID NO: 2241 - RNA, 20 nt, synthetic construct
  source 1..20: mol_type = other RNA
accctggggggagccaaatt

SEQ ID NO: 2242 - RNA, 20 nt, synthetic construct
  source 1..20: mol_type = other RNA
caaactctgagatgtgggtg

SEQ ID NO: 2243 - RNA, 20 nt, synthetic construct
  source 1..20: mol_type = other RNA
gcaaactctgagatgtgggt

SEQ ID NO: 2244 - RNA, 20 nt, synthetic construct
  source 1..20: mol_type = other RNA
tcaactgggagtgggcggag

SEQ ID NO: 2245 - RNA, 20 nt, synthetic construct
  source 1..20: mol_type = other RNA
actgctgaccttgatgtagt

SEQ ID NO: 2246 - RNA, 20 nt, synthetic construct
  source 1..20: mol_type = other RNA
gctggttctggacgcaagcg

SEQ ID NO: 2247 - RNA, 20 nt, synthetic construct
  source 1..20: mol_type = other RNA
ttgttctggaaagggagggt

SEQ ID NO: 2248 - RNA, 20 nt, synthetic construct
  source 1..20: mol_type = other RNA
tgttctggaaagggagggtc

SEQ ID NO: 2249 - RNA, 20 nt, synthetic construct
  source 1..20: mol_type = other RNA
gccactcacattgtccagcg

SEQ ID NO: 2250 - RNA, 20 nt, synthetic construct
  source 1..20: mol_type = other RNA
ctccctaagccgaggacata

SEQ ID NO: 2251 - RNA, 20 nt, synthetic construct
  source 1..20: mol_type = other RNA
tctccctaagccgaggacat

SEQ ID NO: 2252 - RNA, 20 nt, synthetic construct
  source 1..20: mol_type = other RNA
tcacctgcagtgcacgatga

SEQ ID NO: 2253 - RNA, 20 nt, synthetic construct
  source 1..20: mol_type = other RNA
ccggcgctggggaaagacgg

SEQ ID NO: 2254 - RNA, 20 nt, synthetic construct
  source 1..20: mol_type = other RNA
gccggcgctggggaaagacg

SEQ ID NO: 2255 - RNA, 20 nt, synthetic construct
  source 1..20: mol_type = other RNA
tgccggcgctggggaaagac

SEQ ID NO: 2256 - RNA, 20 nt, synthetic construct
  source 1..20: mol_type = other RNA
cactcacttggacgaggtgc

SEQ ID NO: 2257 - RNA, 20 nt, synthetic construct
  source 1..20: mol_type = other RNA
ccactcacttggacgaggtg

SEQ ID NO: 2258 - RNA, 20 nt, synthetic construct
  source 1..20: mol_type = other RNA
tgtctgcagccgggtgcagg

SEQ ID NO: 2259 - RNA, 20 nt, synthetic construct
  source 1..20: mol_type = other RNA
gtgtctgcagccgggtgcag

SEQ ID NO: 2260 - RNA, 20 nt, synthetic construct
  source 1..20: mol_type = other RNA
tgtgtctgcagccgggtgca

SEQ ID NO: 2261 - RNA, 20 nt, synthetic construct
  source 1..20: mol_type = other RNA
caccgctcacttcctcttga

SEQ ID NO: 2262 - RNA, 20 nt, synthetic construct
  source 1..20: mol_type = other RNA
gcaccgctcacttcctcttg

SEQ ID NO: 2263 - RNA, 20 nt, synthetic construct
  source 1..20: mol_type = other RNA
tttcttctaaaatagtccat

SEQ ID NO: 2264 - RNA, 20 nt, synthetic construct
  source 1..20: mol_type = other RNA
gttactgacctttcagaggt

SEQ ID NO: 2265 - RNA, 20 nt, synthetic construct
  source 1..20: mol_type = other RNA
actacttactctgcacaggg

SEQ ID NO: 2266 - RNA, 20 nt, synthetic construct
  source 1..20: mol_type = other RNA
gacctaaaatataaaaaatt

SEQ ID NO: 2267 - RNA, 20 nt, synthetic construct
  source 1..20: mol_type = other RNA
atttacctgaacctctgaat

SEQ ID NO: 2268 - RNA, 20 nt, synthetic construct
  source 1..20: mol_type = other RNA
cttactgtacaacaagctgc

SEQ ID NO: 2269 - RNA, 20 nt, synthetic construct
  source 1..20: mol_type = other RNA
cgatcctgaaaattgaaaac

SEQ ID NO: 2270 - RNA, 20 nt, synthetic construct
  source 1..20: mol_type = other RNA
cccttaccaggcttgatgag

SEQ ID NO: 2271 - RNA, 20 nt, synthetic construct
  source 1..20: mol_type = other RNA
gatattggctaaatacagaa

SEQ ID NO: 2272 - RNA, 20 nt, synthetic construct
  source 1..20: mol_type = other RNA
ttctgtacctcatcaagaat

SEQ ID NO: 2273 - RNA, 20 nt, synthetic construct
  source 1..20: mol_type = other RNA
ttctcctgcaggatttaaaa

SEQ ID NO: 2274 - RNA, 20 nt, synthetic construct
  source 1..20: mol_type = other RNA
ggtcatctgcaggaaaaaaa

SEQ ID NO: 2275 - RNA, 20 nt, synthetic construct
  source 1..20: mol_type = other RNA
caagaactaaatggggaaat

SEQ ID NO: 2276 - RNA, 20 nt, synthetic construct
  source 1..20: mol_type = other RNA
ggcgagcctgagggcggggc

SEQ ID NO: 2277 - RNA, 20 nt, synthetic construct
  source 1..20: mol_type = other RNA
tggcgagcctgagggcgggg

SEQ ID NO: 2278 - RNA, 20 nt, synthetic construct
  source 1..20: mol_type = other RNA
cctcgcctgtcacgtgcagc

SEQ ID NO: 2279 - RNA, 20 nt, synthetic construct
  source 1..20: mol_type = other RNA
gcgcgccagatggccgtcag

SEQ ID NO: 2280 - RNA, 20 nt, synthetic construct
  source 1..20: mol_type = other RNA
tgcatggaccagcgctgcgc

SEQ ID NO: 2281 - RNA, 20 nt, synthetic construct
  source 1..20: mol_type = other RNA
gtccatgcaggtgccacccg

SEQ ID NO: 2282 - RNA, 20 nt, synthetic construct
  source 1..20: mol_type = other RNA
agcgcagcgctggtccatgc

SEQ ID NO: 2283 - RNA, 20 nt, synthetic construct
  source 1..20: mol_type = other RNA
cgcacccacctgggcggcgg

SEQ ID NO: 2284 - RNA, 20 nt, synthetic construct
  source 1..20: mol_type = other RNA
cgcggctgcaggggagaagg

SEQ ID NO: 2285 - RNA, 20 nt, synthetic construct
  source 1..20: mol_type = other RNA
gcacccacctgggcggcggc

SEQ ID NO: 2286 - RNA, 20 nt, synthetic construct
  source 1..20: mol_type = other RNA
cggcgcggctgcaggggaga

SEQ ID NO: 2287 - RNA, 20 nt, synthetic construct
  source 1..20: mol_type = other RNA
gcggctgcaggggagaaggc

SEQ ID NO: 2288 - RNA, 20 nt, synthetic construct
  source 1..20: mol_type = other RNA
gggccggaccaggcgagggc

SEQ ID NO: 2289 - RNA, 20 nt, synthetic construct
  source 1..20: mol_type = other RNA
ccggaccaggcgagggcggg

SEQ ID NO: 2290 - RNA, 20 nt, synthetic construct
  source 1..20: mol_type = other RNA
atttgagccagatgaacccc

SEQ ID NO: 2291 - RNA, 20 nt, synthetic construct
  source 1..20: mol_type = other RNA
ttaccctccgggttgggcag

SEQ ID NO: 2292 - RNA, 20 nt, synthetic construct
  source 1..20: mol_type = other RNA
cttaccctccgggttgggca

SEQ ID NO: 2293 - RNA, 20 nt, synthetic construct
  source 1..20: mol_type = other RNA
gtcctggggaaacaaaggca

SEQ ID NO: 2294 - RNA, 20 nt, synthetic construct
  source 1..20: mol_type = other RNA
atccagtcctggggaaacaa

SEQ ID NO: 2295 - RNA, 20 nt, synthetic construct
  source 1..20: mol_type = other RNA
tactcacccatggtaaactc

SEQ ID NO: 2296 - RNA, 20 nt, synthetic construct
  source 1..20: mol_type = other RNA
taaaaccctgcaggaggtgg

SEQ ID NO: 2297 - RNA, 20 nt, synthetic construct
  source 1..20: mol_type = other RNA
agtctgtgggccagaagaaa

SEQ ID NO: 2298 - RNA, 20 nt, synthetic construct
  source 1..20: mol_type = other RNA
actcacctgtgagctgccaa

SEQ ID NO: 2299 - RNA, 20 nt, synthetic construct
  source 1..20: mol_type = other RNA
gctgccaaaggatatagatg

SEQ ID NO: 2300 - RNA, 20 nt, synthetic construct
  source 1..20: mol_type = other RNA
ctgccaaaggatatagatga

SEQ ID NO: 2301 - RNA, 20 nt, synthetic construct
  source 1..20: mol_type = other RNA
gtcaccttcacagagcttcc

SEQ ID NO: 2302 - RNA, 20 nt, synthetic construct
  source 1..20: mol_type = other RNA
cagcaccttcagagaatggg

SEQ ID NO: 2303 - RNA, 20 nt, synthetic construct
  source 1..20: mol_type = other RNA
caccttcagagaatgggtgg

SEQ ID NO: 2304 - RNA, 20 nt, synthetic construct
  source 1..20: mol_type = other RNA
atgtactctaaaagcaagtt

SEQ ID NO: 2305 - RNA, 20 nt, synthetic construct
  source 1..20: mol_type = other RNA
aatgtactctaaaagcaagt

SEQ ID NO: 2306 - RNA, 20 nt, synthetic construct
  source 1..20: mol_type = other RNA
cgctgcgccagcgccgcgtg

SEQ ID NO: 2307 - RNA, 20 nt, synthetic construct
  source 1..20: mol_type = other RNA
gggcccccagtagaatccgc

SEQ ID NO: 2308 - RNA, 20 nt, synthetic construct
  source 1..20: mol_type = other RNA
cttacctacctcccaatgtc

SEQ ID NO: 2309 - RNA, 20 nt, synthetic construct
  source 1..20: mol_type = other RNA
ctgcatctacagtaatctga

SEQ ID NO: 2310 - RNA, 20 nt, synthetic construct
  source 1..20: mol_type = other RNA
atggtatcctaaaatagaaa

SEQ ID NO: 2311 - RNA, 20 nt, synthetic construct
  source 1..20: mol_type = other RNA
tcatacctgcaggagctgag

SEQ ID NO: 2312 - RNA, 20 nt, synthetic construct
  source 1..20: mol_type = other RNA
taagctagaagagaagtgga

SEQ ID NO: 2313 - RNA, 20 nt, synthetic construct
  source 1..20: mol_type = other RNA
ctcttaagctagaagagaag

SEQ ID NO: 2314 - RNA, 20 nt, synthetic construct
  source 1..20: mol_type = other RNA
gctgcagcctggatcaagcg

SEQ ID NO: 2315 - RNA, 20 nt, synthetic construct
  source 1..20: mol_type = other RNA
gctgcaggacctgtgccgcc

SEQ ID NO: 2316 - RNA, 20 nt, synthetic construct
  source 1..20: mol_type = other RNA
ttcctgttgggggtgggtag

SEQ ID NO: 2317 - RNA, 20 nt, synthetic construct
  source 1..20: mol_type = other RNA
gttcctgttgggggtgggta

SEQ ID NO: 2318 - RNA, 20 nt, synthetic construct
  source 1..20: mol_type = other RNA
tgttcctgttgggggtgggt

SEQ ID NO: 2319 - RNA, 20 nt, synthetic construct
  source 1..20: mol_type = other RNA
acaggaacaggaatattacc

SEQ ID NO: 2320 - RNA, 20 nt, synthetic construct
  source 1..20: mol_type = other RNA
gatatccacgccatttcacc

SEQ ID NO: 2321 - RNA, 20 nt, synthetic construct
  source 1..20: mol_type = other RNA
actcacgtgagcaccgggat

SEQ ID NO: 2322 - RNA, 20 nt, synthetic construct
  source 1..20: mol_type = other RNA
gactcacgtgagcaccggga

SEQ ID NO: 2323 - RNA, 20 nt, synthetic construct
  source 1..20: mol_type = other RNA
cacctgtgaggaaaaggacg

SEQ ID NO: 2324 - RNA, 20 nt, synthetic construct
  source 1..20: mol_type = other RNA
ccacctgtgaggaaaaggac

SEQ ID NO: 2325 - RNA, 20 nt, synthetic construct
  source 1..20: mol_type = other RNA
gactcactgagacaaagtag

SEQ ID NO: 2326 - RNA, 20 nt, synthetic construct
  source 1..20: mol_type = other RNA
accacctgtgaggaaaagga

SEQ ID NO: 2327 - RNA, 20 nt, synthetic construct
  source 1..20: mol_type = other RNA
ggactcactgagacaaagta

SEQ ID NO: 2328 - RNA, 20 nt, synthetic construct
  source 1..20: mol_type = other RNA
gggactcactgagacaaagt

SEQ ID NO: 2329 - RNA, 20 nt, synthetic construct
  source 1..20: mol_type = other RNA
ttacttggcaggctttccaa

SEQ ID NO: 2330 - RNA, 20 nt, synthetic construct
  source 1..20: mol_type = other RNA
cagtacctggggggagagaa

SEQ ID NO: 2331 - RNA, 20 nt, synthetic construct
  source 1..20: mol_type = other RNA
ccagtacctggggggagaga

SEQ ID NO: 2332 - RNA, 20 nt, synthetic construct
  source 1..20: mol_type = other RNA
ttgtgctggaggcaccagaa

SEQ ID NO: 2333 - RNA, 20 nt, synthetic construct
  source 1..20: mol_type = other RNA
attgtgctggaggcaccaga

SEQ ID NO: 2334 - RNA, 20 nt, synthetic construct
  source 1..20: mol_type = other RNA
cccaacgctgacagagagaa

SEQ ID NO: 2335 - RNA, 20 nt, synthetic construct
  source 1..20: mol_type = other RNA
gtcacctgaggacagaaagg

SEQ ID NO: 2336 - RNA, 20 nt, synthetic construct
  source 1..20: mol_type = other RNA
gccgtcacctgaggacagaa

SEQ ID NO: 2337 - RNA, 20 nt, synthetic construct
  source 1..20: mol_type = other RNA
ttccagttctaaggggagcg

SEQ ID NO: 2338 - RNA, 20 nt, synthetic construct
  source 1..20: mol_type = other RNA
tcacctgaaatgacaatgat

SEQ ID NO: 2339 - RNA, 20 nt, synthetic construct
  source 1..20: mol_type = other RNA
catccaacctgaagaccaaa

SEQ ID NO: 2340 - RNA, 20 nt, synthetic construct
  source 1..20: mol_type = other RNA
gatctctgagtggaaagaac

SEQ ID NO: 2341 - RNA, 20 nt, synthetic construct
  source 1..20: mol_type = other RNA
aggacgcgcatccccggggc

SEQ ID NO: 2342 - RNA, 20 nt, synthetic construct
  source 1..20: mol_type = other RNA
tcccacaggtaagcgggtga

SEQ ID NO: 2343 - RNA, 20 nt, synthetic construct
  source 1..20: mol_type = other RNA
ggcgctacgagccttcccac

SEQ ID NO: 2344 - RNA, 20 nt, synthetic construct
  source 1..20: mol_type = other RNA
cccactcacccatggggcag

SEQ ID NO: 2345 - RNA, 20 nt, synthetic construct
  source 1..20: mol_type = other RNA
cgacacagcagtgcccacag

SEQ ID NO: 2346 - RNA, 20 nt, synthetic construct
  source 1..20: mol_type = other RNA
gtcgtctaagggacacagac

SEQ ID NO: 2347 - RNA, 20 nt, synthetic construct
  source 1..20: mol_type = other RNA
tcgtctaagggacacagaca

SEQ ID NO: 2348 - RNA, 20 nt, synthetic construct
  source 1..20: mol_type = other RNA
cgtctaagggacacagacag

SEQ ID NO: 2349 - RNA, 20 nt, synthetic construct
  source 1..20: mol_type = other RNA
cccccaggccaagcccaccc

SEQ ID NO: 2350 - RNA, 20 nt, synthetic construct
  source 1..20: mol_type = other RNA
aaattacctggatctgaact

SEQ ID NO: 2351 - RNA, 20 nt, synthetic construct
  source 1..20: mol_type = other RNA
tcatctaagggacacagatg

SEQ ID NO: 2352 - RNA, 20 nt, synthetic construct
  source 1..20: mol_type = other RNA
gtgctgcggggagaagccca

SEQ ID NO: 2353 - RNA, 20 nt, synthetic construct
  source 1..20: mol_type = other RNA
accattacctgcatccagaa

SEQ ID NO: 2354 - RNA, 20 nt, synthetic construct
  source 1..20: mol_type = other RNA
ccattacctgcatccagaac

SEQ ID NO: 2355 - RNA, 20 nt, synthetic construct
  source 1..20: mol_type = other RNA
ccccactcagagcttgctgg

SEQ ID NO: 2356 - RNA, 20 nt, synthetic construct
  source 1..20: mol_type = other RNA
acccagaagagcactggccc

SEQ ID NO: 2357 - RNA, 20 nt, synthetic construct
  source 1..20: mol_type = other RNA
aggatcacccagaagagcac

SEQ ID NO: 2358 - RNA, 20 nt, synthetic construct
  source 1..20: mol_type = other RNA
tggagctctgaaacgacacc

SEQ ID NO: 2359 - RNA, 20 nt, synthetic construct
  source 1..20: mol_type = other RNA
agctctgaaacgacaccagg

SEQ ID NO: 2360 - RNA, 20 nt, synthetic construct
  source 1..20: mol_type = other RNA
ctcacccacaagctctagct

SEQ ID NO: 2361 - RNA, 20 nt, synthetic construct
  source 1..20: mol_type = other RNA
tcacccacaagctctagctt

SEQ ID NO: 2362 - RNA, 20 nt, synthetic construct
  source 1..20: mol_type = other RNA
acttaccgttgagctcctcc

SEQ ID NO: 2363 - RNA, 20 nt, synthetic construct
  source 1..20: mol_type = other RNA
cttaccgttgagctcctcct

SEQ ID NO: 2364 - RNA, 20 nt, synthetic construct
  source 1..20: mol_type = other RNA
agctgctgtgggacgggaat

SEQ ID NO: 2365 - RNA, 20 nt, synthetic construct
  source 1..20: mol_type = other RNA
cagctgctgtgggacgggaa

SEQ ID NO: 2366 - RNA, 20 nt, synthetic construct
  source 1..20: mol_type = other RNA
ctcctcagctgctgtgggac

SEQ ID NO: 2367 - RNA, 20 nt, synthetic construct
  source 1..20: mol_type = other RNA
gccgctgcaggatgccagcc

SEQ ID NO: 2368 - RNA, 20 nt, synthetic construct
  source 1..20: mol_type = other RNA
tgactcaccaatcttgttat

SEQ ID NO: 2369 - RNA, 20 nt, synthetic construct
  source 1..20: mol_type = other RNA
tctctgcaaggcaaaaggat

SEQ ID NO: 2370 - RNA, 20 nt, synthetic construct
  source 1..20: mol_type = other RNA
ttctctgcaaggcaaaagga

SEQ ID NO: 2371 - RNA, 20 nt, synthetic construct
  source 1..20: mol_type = other RNA
actcaccaacagcaggaccg

SEQ ID NO: 2372 - RNA, 20 nt, synthetic construct
  source 1..20: mol_type = other RNA
gagacctgtggggacaaagc

SEQ ID NO: 2373 - RNA, 20 nt, synthetic construct
  source 1..20: mol_type = other RNA
ctcaccctgtgcggcacttc

SEQ ID NO: 2374 - RNA, 20 nt, synthetic construct
  source 1..20: mol_type = other RNA
acacctgggtacacacacag

SEQ ID NO: 2375 - RNA, 20 nt, synthetic construct
  source 1..20: mol_type = other RNA
tgagctctggaaaaagacat

SEQ ID NO: 2376 - RNA, 20 nt, synthetic construct
  source 1..20: mol_type = other RNA
ccggttcctgtaacacatag

SEQ ID NO: 2377 - RNA, 20 nt, synthetic construct
  source 1..20: mol_type = other RNA
cggttcctgtaacacatagt

SEQ ID NO: 2378 - RNA, 20 nt, synthetic construct
  source 1..20: mol_type = other RNA
gttcaccttgttgcaatagt

SEQ ID NO: 2379 - RNA, 20 nt, synthetic construct
  source 1..20: mol_type = other RNA
ttcaccttgttgcaatagta

SEQ ID NO: 2380 - RNA, 20 nt, synthetic construct
  source 1..20: mol_type = other RNA
tcaccttgttgcaatagtag

SEQ ID NO: 2381 - RNA, 20 nt, synthetic construct
  source 1..20: mol_type = other RNA
tcacagctaagtgctcaact

SEQ ID NO: 2382 - RNA, 20 nt, synthetic construct
  source 1..20: mol_type = other RNA
tgatactcaggccgccatca

SEQ ID NO: 2383 - RNA, 20 nt, synthetic construct
  source 1..20: mol_type = other RNA
gatactcaggccgccatcaa

SEQ ID NO: 2384 - RNA, 20 nt, synthetic construct
  source 1..20: mol_type = other RNA
gagaagagcaaaaacaggta

SEQ ID NO: 2385 - RNA, 20 nt, synthetic construct
  source 1..20: mol_type = other RNA
agaagagcaaaaacaggtaa

SEQ ID NO: 2386 - RNA, 20 nt, synthetic construct
  source 1..20: mol_type = other RNA
cgttaccttggatacaaggc

SEQ ID NO: 2387 - RNA, 20 nt, synthetic construct
  source 1..20: mol_type = other RNA
tcaccatgcagcagcccctt

SEQ ID NO: 2388 - RNA, 20 nt, synthetic construct
  source 1..20: mol_type = other RNA
tgggaaccagctccccatgc

SEQ ID NO: 2389 - RNA, 20 nt, synthetic construct
  source 1..20: mol_type = other RNA
catgcagcaagtaagtgcaa

SEQ ID NO: 2390 - RNA, 20 nt, synthetic construct
  source 1..20: mol_type = other RNA
tgcacttacttgctgcatgg

SEQ ID NO: 2391 - RNA, 20 nt, synthetic construct
  source 1..20: mol_type = other RNA
gcacttacttgctgcatggt

SEQ ID NO: 2392 - RNA, 20 nt, synthetic construct
  source 1..20: mol_type = other RNA
agctgcacaagttgtcaccc

SEQ ID NO: 2393 - RNA, 20 nt, synthetic construct
  source 1..20: mol_type = other RNA
ctcccccacaaccggtggac

SEQ ID NO: 2394 - RNA, 20 nt, synthetic construct
  source 1..20: mol_type = other RNA
ttattccagtccaccggttg

SEQ ID NO: 2395 - RNA, 20 nt, synthetic construct
  source 1..20: mol_type = other RNA
tattccagtccaccggttgt

SEQ ID NO: 2396 - RNA, 20 nt, synthetic construct
  source 1..20: mol_type = other RNA
attccagtccaccggttgtg

SEQ ID NO: 2397 - RNA, 20 nt, synthetic construct
  source 1..20: mol_type = other RNA
ttccagtccaccggttgtgg

SEQ ID NO: 2398 - RNA, 20 nt, synthetic construct
  source 1..20: mol_type = other RNA
gtccatggcgggcgcggcgg

SEQ ID NO: 2399 - RNA, 20 nt, synthetic construct
  source 1..20: mol_type = other RNA
gacgtccatggcgggcgcgg

SEQ ID NO: 2400 - RNA, 20 nt, synthetic construct
  source 1..20: mol_type = other RNA
tatgcagcagactcgcacag

SEQ ID NO: 2401 - RNA, 20 nt, synthetic construct
  source 1..20: mol_type = other RNA
tttccgcagaaggtaagcag

SEQ ID NO: 2402 - RNA, 20 nt, synthetic construct
  source 1..20: mol_type = other RNA
tcaaactagaatagagagag

SEQ ID NO: 2403 - RNA, 20 nt, synthetic construct
  source 1..20: mol_type = other RNA
caaactagaatagagagaga

SEQ ID NO: 2404 - RNA, 20 nt, synthetic construct
  source 1..20: mol_type = other RNA
cacccacctggctggttgac

SEQ ID NO: 2405 - RNA, 20 nt, synthetic construct
  source 1..20: mol_type = other RNA
tggatctaagagaggaggac

SEQ ID NO: 2406 - RNA, 20 nt, synthetic construct
  source 1..20: mol_type = other RNA
gatccaggagatggtccact

SEQ ID NO: 2407 - RNA, 20 nt, synthetic construct
  source 1..20: mol_type = other RNA
gtcccagctcatctcgcaga

SEQ ID NO: 2408 - RNA, 20 nt, synthetic construct
  source 1..20: mol_type = other RNA
tcatctcgcagatgggcatc

SEQ ID NO: 2409 - RNA, 20 nt, synthetic construct
  source 1..20: mol_type = other RNA
ctccactcaggaagaggagt

SEQ ID NO: 2410 - RNA, 20 nt, synthetic construct
  source 1..20: mol_type = other RNA
tgagccgcagaagcctgtgt

SEQ ID NO: 2411 - RNA, 20 nt, synthetic construct
  source 1..20: mol_type = other RNA
agacactcaggccgccatca

SEQ ID NO: 2412 - RNA, 20 nt, synthetic construct
  source 1..20: mol_type = other RNA
gacactcaggccgccatcaa

SEQ ID NO: 2413 - RNA, 20 nt, synthetic construct
  source 1..20: mol_type = other RNA
gacctgcaggccttccgcag

SEQ ID NO: 2414 - RNA, 20 nt, synthetic construct
  source 1..20: mol_type = other RNA
acctgcaggccttccgcagt

SEQ ID NO: 2415 - RNA, 20 nt, synthetic construct
  source 1..20: mol_type = other RNA
cctgcaggccttccgcagtg

SEQ ID NO: 2416 - RNA, 20 nt, synthetic construct
  source 1..20: mol_type = other RNA
ctgcttacctgtggccctgg

SEQ ID NO: 2417 - RNA, 20 nt, synthetic construct
  source 1..20: mol_type = other RNA
ggaagtcctacagagtggga

SEQ ID NO: 2418 - RNA, 20 nt, synthetic construct
  source 1..20: mol_type = other RNA
agtcctacagagtgggaagg

SEQ ID NO: 2419 - RNA, 20 nt, synthetic construct
  source 1..20: mol_type = other RNA
gtcccagtccccgctgctgg

SEQ ID NO: 2420 - RNA, 20 nt, synthetic construct
  source 1..20: mol_type = other RNA
tcccagtccccgctgctggt

SEQ ID NO: 2421 - RNA, 20 nt, synthetic construct
  source 1..20: mol_type = other RNA
gctgtcccagtccccgctgc

SEQ ID NO: 2422 - RNA, 20 nt, synthetic construct
  source 1..20: mol_type = other RNA
caggctgtgagagagaggag

SEQ ID NO: 2423 - RNA, 20 nt, synthetic construct
  source 1..20: mol_type = other RNA
gcaggctgtgagagagagga

SEQ ID NO: 2424 - RNA, 20 nt, synthetic construct
  source 1..20: mol_type = other RNA
agcaggctgtgagagagagg

SEQ ID NO: 2425 - RNA, 20 nt, synthetic construct
  source 1..20: mol_type = other RNA
tgccatctcttcctgccctt

SEQ ID NO: 2426 - RNA, 20 nt, synthetic construct
  source 1..20: mol_type = other RNA
gtactcacgcggtgtgcacc

SEQ ID NO: 2427 - RNA, 20 nt, synthetic construct
  source 1..20: mol_type = other RNA
ggaagtgcctgggtgaggac

SEQ ID NO: 2428 - RNA, 20 nt, synthetic construct
  source 1..20: mol_type = other RNA
agggtctagaaaagaggcaa

SEQ ID NO: 2429 - RNA, 20 nt, synthetic construct
  source 1..20: mol_type = other RNA
gggtctagaaaagaggcaaa

SEQ ID NO: 2430 - RNA, 20 nt, synthetic construct
  source 1..20: mol_type = other RNA
ggtctagaaaagaggcaaag

SEQ ID NO: 2431 - RNA, 20 nt, synthetic construct
  source 1..20: mol_type = other RNA
ggtagcctggggggtggggc

SEQ ID NO: 2432 - RNA, 20 nt, synthetic construct
  source 1..20: mol_type = other RNA
cccctggaaaatagtgaaaa

SEQ ID NO: 2433 - RNA, 20 nt, synthetic construct
  source 1..20: mol_type = other RNA
ctgaccttccaggatgagtt

SEQ ID NO: 2434 - RNA, 20 nt, synthetic construct
  source 1..20: mol_type = other RNA
gaggttctcactgaccttcc

SEQ ID NO: 2435 - RNA, 20 nt, synthetic construct
  source 1..20: mol_type = other RNA
gcgggcctggaaggatgaga

SEQ ID NO: 2436 - RNA, 20 nt, synthetic construct
  source 1..20: mol_type = other RNA
gcgtacctttctcacgagtt

SEQ ID NO: 2437 - RNA, 20 nt, synthetic construct
  source 1..20: mol_type = other RNA
cgcgtacctttctcacgagt

SEQ ID NO: 2438 - RNA, 20 nt, synthetic construct
  source 1..20: mol_type = other RNA
ggcccgtacctcggtagctg

SEQ ID NO: 2439 - RNA, 20 nt, synthetic construct
  source 1..20: mol_type = other RNA
gtcccagttctccgccctcc

SEQ ID NO: 2440 - RNA, 20 nt, synthetic construct
  source 1..20: mol_type = other RNA
ggaacaagccagggtcatgt

SEQ ID NO: 2441 - RNA, 20 nt, synthetic construct
  source 1..20: mol_type = other RNA
caacccctccatctcccagc

SEQ ID NO: 2442 - RNA, 20 nt, synthetic construct
  source 1..20: mol_type = other RNA
tgacctatcgggacaagcaa

SEQ ID NO: 2443 - RNA, 20 nt, synthetic construct
  source 1..20: mol_type = other RNA
agtacctggcagtgtgatat

SEQ ID NO: 2444 - RNA, 20 nt, synthetic construct
  source 1..20: mol_type = other RNA
atgtgcagaaagacctggag

SEQ ID NO: 2445 - RNA, 20 nt, synthetic construct
  source 1..20: mol_type = other RNA
gggcagcccgcctccgccgc

SEQ ID NO: 2446 - RNA, 20 nt, synthetic construct
  source 1..20: mol_type = other RNA
cctacctgtcaccaggacca

SEQ ID NO: 2447 - RNA, 20 nt, synthetic construct
  source 1..20: mol_type = other RNA
ctcttacctgtaccataacc

SEQ ID NO: 2448 - RNA, 20 nt, synthetic construct
  source 1..20: mol_type = other RNA
actcacgctggatagcctcc

SEQ ID NO: 2449 - RNA, 20 nt, synthetic construct
  source 1..20: mol_type = other RNA
cactcaccttagcctgagca

SEQ ID NO: 2450 - RNA, 20 nt, synthetic construct
  source 1..20: mol_type = other RNA
cttaccccacttaactatct

SEQ ID NO: 2451 - RNA, 20 nt, synthetic construct
  source 1..20: mol_type = other RNA
ccctacctgtcaccaggacc

SEQ ID NO: 2452 - RNA, 20 nt, synthetic construct
  source 1..20: mol_type = other RNA
attatacctgccatgccgta

SEQ ID NO: 2453 - RNA, 21 nt, synthetic construct
  source 1..21: mol_type = other RNA
gcagagcactggaattcgtca

SEQ ID NO: 2454 - RNA, 20 nt, synthetic construct
  source 1..20: mol_type = other RNA
tcgatctatgaaaaagacag

SEQ ID NO: 2455 - RNA, 20 nt, synthetic construct
  source 1..20: mol_type = other RNA
ccttacctagggacgcagcc

SEQ ID NO: 2456 - RNA, 20 nt, synthetic construct
  source 1..20: mol_type = other RNA
ggatccccagcgccagctgc

SEQ ID NO: 2457 - RNA, 20 nt, synthetic construct
  source 1..20: mol_type = other RNA
agcgccagctgccggcctcc

SEQ ID NO: 2458 - RNA, 20 nt, synthetic construct
  source 1..20: mol_type = other RNA
gcgccagctgccggcctcca

SEQ ID NO: 2459 - RNA, 20 nt, synthetic construct
  source 1..20: mol_type = other RNA
cctggctcagcgccacgggc

SEQ ID NO: 2460 - RNA, 20 nt, synthetic construct
  source 1..20: mol_type = other RNA
gctgcaggtgcagacaggtg

SEQ ID NO: 2461 - RNA, 20 nt, synthetic construct
  source 1..20: mol_type = other RNA
gcggtaccacgtcttgtaga

SEQ ID NO: 2462 - RNA, 20 nt, synthetic construct
  source 1..20: mol_type = other RNA
tgcctgtgggaacaaacaga

SEQ ID NO: 2463 - RNA, 20 nt, synthetic construct
  source 1..20: mol_type = other RNA
cttactttcactatcctggg

SEQ ID NO: 2464 - RNA, 20 nt, synthetic construct
  source 1..20: mol_type = other RNA
tcccttactttcactatcct

SEQ ID NO: 2465 - RNA, 20 nt, synthetic construct
  source 1..20: mol_type = other RNA
ctcccaggatagtgaaagta

SEQ ID NO: 2466 - RNA, 20 nt, synthetic construct
  source 1..20: mol_type = other RNA
tgatgtctgaaagggcagag

SEQ ID NO: 2467 - RNA, 20 nt, synthetic construct
  source 1..20: mol_type = other RNA
tgcccaggagctggtgcgga

SEQ ID NO: 2468 - RNA, 20 nt, synthetic construct
  source 1..20: mol_type = other RNA
ttgctgccacagaaccagaa

SEQ ID NO: 2469 - RNA, 20 nt, synthetic construct
  source 1..20: mol_type = other RNA
attcaagggattgaaaaccc

SEQ ID NO: 2470 - RNA, 20 nt, synthetic construct
  source 1..20: mol_type = other RNA
acctgcccaggggatacccg

SEQ ID NO: 2471 - RNA, 20 nt, synthetic construct
  source 1..20: mol_type = other RNA
cagcggcagccttctgagtc

SEQ ID NO: 2472 - RNA, 20 nt, synthetic construct
  source 1..20: mol_type = other RNA
gctacaaacaagctcatctt

SEQ ID NO: 2473 - RNA, 20 nt, synthetic construct
  source 1..20: mol_type = other RNA
ccagccaagtacgtaagtag

SEQ ID NO: 2474 - RNA, 20 nt, synthetic construct
  source 1..20: mol_type = other RNA
ctggatatctgtgggacaag

SEQ ID NO: 2475 - RNA, 20 nt, synthetic construct
  source 1..20: mol_type = other RNA
ggaccctgcatagagagaga

SEQ ID NO: 2476 - RNA, 20 nt, synthetic construct
  source 1..20: mol_type = other RNA
tgccccagcagacgggcacg

SEQ ID NO: 2477 - RNA, 20 nt, synthetic construct
  source 1..20: mol_type = other RNA
gttacctgggccatgtcccc

SEQ ID NO: 2478 - RNA, 20 nt, synthetic construct
  source 1..20: mol_type = other RNA
cttactgttagatttatatc

SEQ ID NO: 2479 - RNA, 20 nt, synthetic construct
  source 1..20: mol_type = other RNA
ttactgttagatttatatca

SEQ ID NO: 2480 - RNA, 20 nt, synthetic construct
  source 1..20: mol_type = other RNA
tttgctatggaaacacaaac

SEQ ID NO: 2481 - RNA, 20 nt, synthetic construct
  source 1..20: mol_type = other RNA
tccatagcaaatatccacat

SEQ ID NO: 2482 - RNA, 20 nt, synthetic construct
  source 1..20: mol_type = other RNA
gcagcaaccctcacaacctt

SEQ ID NO: 2483 - RNA, 20 nt, synthetic construct
  source 1..20: mol_type = other RNA
cagcaaccctcacaaccttt

SEQ ID NO: 2484 - RNA, 20 nt, synthetic construct
  source 1..20: mol_type = other RNA
aggcaggctcccctcgcctc

SEQ ID NO: 2485 - RNA, 20 nt, synthetic construct
  source 1..20: mol_type = other RNA
ggagcagcaggaccagcttc

SEQ ID NO: 2486 - RNA, 20 nt, synthetic construct
  source 1..20: mol_type = other RNA
caggaatacctgagctttct

SEQ ID NO: 2487 - RNA, 20 nt, synthetic construct
  source 1..20: mol_type = other RNA
aggttccagattccattgct

SEQ ID NO: 2488 - RNA, 20 nt, synthetic construct
  source 1..20: mol_type = other RNA
ctgggcccaggggctgaggc

SEQ ID NO: 2489 - RNA, 20 nt, synthetic construct
  source 1..20: mol_type = other RNA
gatcgagtggccccaggtcc

SEQ ID NO: 2490 - RNA, 20 nt, synthetic construct
  source 1..20: mol_type = other RNA
tcacccgacttctgaacgtg

SEQ ID NO: 2491 - RNA, 20 nt, synthetic construct
  source 1..20: mol_type = other RNA
ttacctgcccactgttagcc

SEQ ID NO: 2492 - RNA, 20 nt, synthetic construct
  source 1..20: mol_type = other RNA
gaagccacaggaagtctgtg

SEQ ID NO: 2493 - RNA, 20 nt, synthetic construct
  source 1..20: mol_type = other RNA
actccagttcctgacggctg

SEQ ID NO: 2494 - RNA, 20 nt, synthetic construct
  source 1..20: mol_type = other RNA
acctacaggagtacctgacg

SEQ ID NO: 2495 - RNA, 20 nt, synthetic construct
  source 1..20: mol_type = other RNA
ttcccagagcaccagagcca

SEQ ID NO: 2496 - RNA, 20 nt, synthetic construct
  source 1..20: mol_type = other RNA
acgttcagaagtcgggtgag

SEQ ID NO: 2497 - RNA, 20 nt, synthetic construct
  source 1..20: mol_type = other RNA
ttcagagcagtttgagacag

SEQ ID NO: 2498 - RNA, 20 nt, synthetic construct
  source 1..20: mol_type = other RNA
cctgctgggaaacagacaac

SEQ ID NO: 2499 - RNA, 20 nt, synthetic construct
  source 1..20: mol_type = other RNA
cactcacagtctagggtggc

SEQ ID NO: 2500 - RNA, 20 nt, synthetic construct
  source 1..20: mol_type = other RNA
caaccggcagcgagggaacg

SEQ ID NO: 2501 - RNA, 20 nt, synthetic construct
  source 1..20: mol_type = other RNA
acagggctggggcaggacag

SEQ ID NO: 2502 - RNA, 20 nt, synthetic construct
  source 1..20: mol_type = other RNA
catccaccagctcgcagcac

SEQ ID NO: 2503 - RNA, 20 nt, synthetic construct
  source 1..20: mol_type = other RNA
atccaccagctcgcagcaca

SEQ ID NO: 2504 - RNA, 20 nt, synthetic construct
  source 1..20: mol_type = other RNA
tccaccagctcgcagcacag

SEQ ID NO: 2505 - RNA, 20 nt, synthetic construct
  source 1..20: mol_type = other RNA
ccaccagctcgcagcacagg

SEQ ID NO: 2506 - RNA, 20 nt, synthetic construct
  source 1..20: mol_type = other RNA
tgtcacctggcaggaggagg

SEQ ID NO: 2507 - RNA, 20 nt, synthetic construct
  source 1..20: mol_type = other RNA
gtcacctggcaggaggaggc

SEQ ID NO: 2508 - RNA, 20 nt, synthetic construct
  source 1..20: mol_type = other RNA
ggcaccctgcagggagaaga

SEQ ID NO: 2509 - RNA, 20 nt, synthetic construct
  source 1..20: mol_type = other RNA
gcaccctgcagggagaagaa

SEQ ID NO: 2510 - RNA, 20 nt, synthetic construct
  source 1..20: mol_type = other RNA
attctgtcgtgggtaggggc

SEQ ID NO: 2511 - RNA, 20 nt, synthetic construct
  source 1..20: mol_type = other RNA
ctccattctgtcgtgggtag

SEQ ID NO: 2512 - RNA, 20 nt, synthetic construct
  source 1..20: mol_type = other RNA
cctcgggctgcaaaggagag

SEQ ID NO: 2513 - RNA, 20 nt, synthetic construct
  source 1..20: mol_type = other RNA
cgggctgcaaaggagagggg

SEQ ID NO: 2514 - RNA, 20 nt, synthetic construct
  source 1..20: mol_type = other RNA
gctgacctttccggtatccc

SEQ ID NO: 2515 - RNA, 20 nt, synthetic construct
  source 1..20: mol_type = other RNA
ctgacctttccggtatccca

SEQ ID NO: 2516 - RNA, 20 nt, synthetic construct
  source 1..20: mol_type = other RNA
tgttgcactgagatggggca

SEQ ID NO: 2517 - RNA, 20 nt, synthetic construct
  source 1..20: mol_type = other RNA
ctgttgcactgagatggggc

SEQ ID NO: 2518 - RNA, 20 nt, synthetic construct
  source 1..20: mol_type = other RNA
gccctgcagcccccagaacc

SEQ ID NO: 2519 - RNA, 20 nt, synthetic construct
  source 1..20: mol_type = other RNA
ctcacccgcagtgacacaca

SEQ ID NO: 2520 - RNA, 20 nt, synthetic construct
  source 1..20: mol_type = other RNA
gcagcacccagggcaggacc

SEQ ID NO: 2521 - RNA, 20 nt, synthetic construct
  source 1..20: mol_type = other RNA
cagcacccagggcaggacca

SEQ ID NO: 2522 - RNA, 20 nt, synthetic construct
  source 1..20: mol_type = other RNA
gtccctgtggaacagcagca

SEQ ID NO: 2523 - RNA, 20 nt, synthetic construct
  source 1..20: mol_type = other RNA
gtgggttcaagttcggatgg

SEQ ID NO: 2524 - RNA, 20 nt, synthetic construct
  source 1..20: mol_type = other RNA
gccccacctgggtctgagct

SEQ ID NO: 2525 - RNA, 20 nt, synthetic construct
  source 1..20: mol_type = other RNA
ggccccacctgggtctgagc

SEQ ID NO: 2526 - RNA, 20 nt, synthetic construct
  source 1..20: mol_type = other RNA
ccacctgggtctgagctggg

SEQ ID NO: 2527 - RNA, 20 nt, synthetic construct
  source 1..20: mol_type = other RNA
aggcctcccaggagccctca

SEQ ID NO: 2528 - RNA, 20 nt, synthetic construct
  source 1..20: mol_type = other RNA
ctcccaggagccctcaggga

SEQ ID NO: 2529 - RNA, 20 nt, synthetic construct
  source 1..20: mol_type = other RNA
cccccagctcacagtcacca

SEQ ID NO: 2530 - RNA, 20 nt, synthetic construct
  source 1..20: mol_type = other RNA
ggtctcaccggtgcttatgt

SEQ ID NO: 2531 - RNA, 20 nt, synthetic construct
  source 1..20: mol_type = other RNA
tgctgcgccgacataagcac

SEQ ID NO: 2532 - RNA, 20 nt, synthetic construct
  source 1..20: mol_type = other RNA
ggcagggctgggagagagca

SEQ ID NO: 2533 - RNA, 20 nt, synthetic construct
  source 1..20: mol_type = other RNA
cgagagcacgagcatgggtg

SEQ ID NO: 2534 - RNA, 20 nt, synthetic construct
  source 1..20: mol_type = other RNA
gagcacgagcatgggtgagg

SEQ ID NO: 2535 - RNA, 20 nt, synthetic construct
  source 1..20: mol_type = other RNA
agcacgagcatgggtgagga

SEQ ID NO: 2536 - RNA, 20 nt, synthetic construct
  source 1..20: mol_type = other RNA
gcacgagcatgggtgaggag

SEQ ID NO: 2537 - RNA, 20 nt, synthetic construct
  source 1..20: mol_type = other RNA
ctcacccatgctcgtgctct

SEQ ID NO: 2538 - RNA, 20 nt, synthetic construct
  source 1..20: mol_type = other RNA
ggtgcctgcgcgggggaagg

SEQ ID NO: 2539 - RNA, 20 nt, synthetic construct
  source 1..20: mol_type = other RNA
gtgcctgcgcgggggaagga

SEQ ID NO: 2540 - RNA, 20 nt, synthetic construct
  source 1..20: mol_type = other RNA
cttggtgcctgcgcggggga

SEQ ID NO: 2541 - RNA, 20 nt, synthetic construct
  source 1..20: mol_type = other RNA
ggccccagggccctgccgcc

SEQ ID NO: 2542 - RNA, 20 nt, synthetic construct
  source 1..20: mol_type = other RNA
tctacgctcaggcaggggag

SEQ ID NO: 2543 - RNA, 20 nt, synthetic construct
  source 1..20: mol_type = other RNA
ccaccaggacggccccccat

SEQ ID NO: 2544 - RNA, 20 nt, synthetic construct
  source 1..20: mol_type = other RNA
aggcccaggcggcagggccc

SEQ ID NO: 2545 - RNA, 20 nt, synthetic construct
  source 1..20: mol_type = other RNA
ggcccaggcggcagggccct

SEQ ID NO: 2546 - RNA, 20 nt, synthetic construct
  source 1..20: mol_type = other RNA
acgactggccagggcgcctg

SEQ ID NO: 2547 - RNA, 20 nt, synthetic construct
  source 1..20: mol_type = other RNA
caccgcccagacgactggcc

SEQ ID NO: 2548 - RNA, 20 nt, synthetic construct
  source 1..20: mol_type = other RNA
ctacaactgggctggcggcc

SEQ ID NO: 2549 - RNA, 20 nt, synthetic construct
  source 1..20: mol_type = other RNA
cagcaaccagacggacaagc

SEQ ID NO: 2550 - RNA, 20 nt, synthetic construct
  source 1..20: mol_type = other RNA
gtgtcacacaactgcccaac

SEQ ID NO: 2551 - RNA, 20 nt, synthetic construct
  source 1..20: mol_type = other RNA
agccggccagttccaaaccc

SEQ ID NO: 2552 - RNA, 20 nt, synthetic construct
  source 1..20: mol_type = other RNA
cggccagttccaaaccctgg

SEQ ID NO: 2553 - RNA, 20 nt, synthetic construct
  source 1..20: mol_type = other RNA
tccctgcagagaaacacact

SEQ ID NO: 2554 - RNA, 20 nt, synthetic construct
  source 1..20: mol_type = other RNA
gagactcaccaggggctggc

SEQ ID NO: 2555 - RNA, 20 nt, synthetic construct
  source 1..20: mol_type = other RNA
cctccttctttgaggagaaa

SEQ ID NO: 2556 - RNA, 20 nt, synthetic construct
  source 1..20: mol_type = other RNA
ccagtggcgagagaagaccc

SEQ ID NO: 2557 - RNA, 20 nt, synthetic construct
  source 1..20: mol_type = other RNA
tgcccagccactgaggcctg

SEQ ID NO: 2558 - RNA, 20 nt, synthetic construct
  source 1..20: mol_type = other RNA
cgactggccagggcgcctgt

SEQ ID NO: 2559 - RNA, 20 nt, synthetic construct
  source 1..20: mol_type = other RNA
accgcccagacgactggcca

SEQ ID NO: 2560 - RNA, 20 nt, synthetic construct
  source 1..20: mol_type = other RNA
tatccaaggactgagggcca

SEQ ID NO: 2561 - RNA, 20 nt, synthetic construct
  source 1..20: mol_type = other RNA
ggcgtctcaaacaggtatct

SEQ ID NO: 2562 - RNA, 20 nt, synthetic construct
  source 1..20: mol_type = other RNA
caaagcctgaagagaaatcc

SEQ ID NO: 2563 - RNA, 20 nt, synthetic construct
  source 1..20: mol_type = other RNA
agagcctgaaggagaagtct

SEQ ID NO: 2564 - RNA, 20 nt, synthetic construct
  source 1..20: mol_type = other RNA
tcccagtaccgggaaggcga

SEQ ID NO: 2565 - RNA, 20 nt, synthetic construct
  source 1..20: mol_type = other RNA
ggttcctgtggagcacaggg

SEQ ID NO: 2566 - RNA, 20 nt, synthetic construct
  source 1..20: mol_type = other RNA
tggggttcctgtggagcaca

SEQ ID NO: 2567 - RNA, 20 nt, synthetic construct
  source 1..20: mol_type = other RNA
tcatttcctagatgggagac

SEQ ID NO: 2568 - RNA, 20 nt, synthetic construct
  source 1..20: mol_type = other RNA
ttcctagatgggagacaggc

SEQ ID NO: 2569 - RNA, 20 nt, synthetic construct
  source 1..20: mol_type = other RNA
ccaggtgtctgaggaggaag

SEQ ID NO: 2570 - RNA, 20 nt, synthetic construct
  source 1..20: mol_type = other RNA
gtgtctgaggaggaagggga

SEQ ID NO: 2571 - RNA, 20 nt, synthetic construct
  source 1..20: mol_type = other RNA
tagtcctgggtggggtaggg

SEQ ID NO: 2572 - RNA, 20 nt, synthetic construct
  source 1..20: mol_type = other RNA
agtcctgggtggggtagggt

SEQ ID NO: 2573 - RNA, 20 nt, synthetic construct
  source 1..20: mol_type = other RNA
cattacctcatagtaggcaa

SEQ ID NO: 2574 - RNA, 20 nt, synthetic construct
  source 1..20: mol_type = other RNA
ccattacctcatagtaggca

SEQ ID NO: 2575 - RNA, 20 nt, synthetic construct
  source 1..20: mol_type = other RNA
acagatctgagcagataaca

SEQ ID NO: 2576 - RNA, 20 nt, synthetic construct
  source 1..20: mol_type = other RNA
tcctacccactggttgccct

SEQ ID NO: 2577 - RNA, 20 nt, synthetic construct
  source 1..20: mol_type = other RNA
aggtgcagtacctgaaggac

SEQ ID NO: 2578 - RNA, 20 nt, synthetic construct
  source 1..20: mol_type = other RNA
caggcagctggcgggcgcca

SEQ ID NO: 2579 - RNA, 20 nt, synthetic construct
  source 1..20: mol_type = other RNA
gacttccagggctccttctg

SEQ ID NO: 2580 - RNA, 20 nt, synthetic construct
  source 1..20: mol_type = other RNA
catccagatacattttgtca

SEQ ID NO: 2581 - RNA, 20 nt, synthetic construct
  source 1..20: mol_type = other RNA
acctgccaaacacagacagt

SEQ ID NO: 2582 - RNA, 20 nt, synthetic construct
  source 1..20: mol_type = other RNA
cgtgcagatgcaatggtcca

SEQ ID NO: 2583 - RNA, 20 nt, synthetic construct
  source 1..20: mol_type = other RNA
tgtaactgtaacaaaacata

SEQ ID NO: 2584 - RNA, 20 nt, synthetic construct
  source 1..20: mol_type = other RNA
acttaccaccgaccatgcat

SEQ ID NO: 2585 - RNA, 20 nt, synthetic construct
  source 1..20: mol_type = other RNA
cttaccaaaaaccttgactg

SEQ ID NO: 2586 - RNA, 20 nt, synthetic construct
  source 1..20: mol_type = other RNA
ccagtccaaatcttcgatga

SEQ ID NO: 2587 - RNA, 20 nt, synthetic construct
  source 1..20: mol_type = other RNA
cagtccaaatcttcgatgat

SEQ ID NO: 2588 - RNA, 20 nt, synthetic construct
  source 1..20: mol_type = other RNA
aaaccatgtgatatttgctt

SEQ ID NO: 2589 - RNA, 20 nt, synthetic construct
  source 1..20: mol_type = other RNA
atgttccacactttatttcc

SEQ ID NO: 2590 - RNA, 20 nt, synthetic construct
  source 1..20: mol_type = other RNA
tcacgttgaggagtggtgtt

SEQ ID NO: 2591 - RNA, 20 nt, synthetic construct
  source 1..20: mol_type = other RNA
cattgtctagggatataaag

SEQ ID NO: 2592 - RNA, 20 nt, synthetic construct
  source 1..20: mol_type = other RNA
acattgtctagggatataaa

SEQ ID NO: 2593 - RNA, 20 nt, synthetic construct
  source 1..20: mol_type = other RNA
gacattgtctagggatataa

SEQ ID NO: 2594 - RNA, 20 nt, synthetic construct
  source 1..20: mol_type = other RNA
tggccaggacattccatctt

SEQ ID NO: 2595 - RNA, 20 nt, synthetic construct
  source 1..20: mol_type = other RNA
ccattctaggaacaaaatat

SEQ ID NO: 2596 - RNA, 20 nt, synthetic construct
  source 1..20: mol_type = other RNA
gagcttccaagtcttctcca

SEQ ID NO: 2597 - RNA, 20 nt, synthetic construct
  source 1..20: mol_type = other RNA
tccccgaaaaggtcgaattt

SEQ ID NO: 2598 - RNA, 20 nt, synthetic construct
  source 1..20: mol_type = other RNA
atgaagaacagtcacaggac

SEQ ID NO: 2599 - RNA, 20 nt, synthetic construct
  source 1..20: mol_type = other RNA
gatttcgtctgtaggcacaa

SEQ ID NO: 2600 - RNA, 20 nt, synthetic construct
  source 1..20: mol_type = other RNA
taaacttacctgaaacagcc

SEQ ID NO: 2601 - RNA, 20 nt, synthetic construct
  source 1..20: mol_type = other RNA
attcagacagtgccttcatg

SEQ ID NO: 2602 - RNA, 20 nt, synthetic construct
  source 1..20: mol_type = other RNA
gttgcactcgattgggacag

SEQ ID NO: 2603 - RNA, 20 nt, synthetic construct
  source 1..20: mol_type = other RNA
ttatttcaagccctgattga

SEQ ID NO: 2604 - RNA, 20 nt, synthetic construct
  source 1..20: mol_type = other RNA
ttacctgtgtaacttttata

SEQ ID NO: 2605 - RNA, 20 nt, synthetic construct
  source 1..20: mol_type = other RNA
attgttcctggaatttgggg

SEQ ID NO: 2606 - RNA, 20 nt, synthetic construct
  source 1..20: mol_type = other RNA
gttcctggaatttggggagg

SEQ ID NO: 2607 - RNA, 20 nt, synthetic construct
  source 1..20: mol_type = other RNA
ctgccatgccgtaaggcaag

SEQ ID NO: 2608 - RNA, 20 nt, synthetic construct
  source 1..20: mol_type = other RNA
tctacctttggtgaacccgt

SEQ ID NO: 2609 - RNA, 20 nt, synthetic construct
  source 1..20: mol_type = other RNA
cttaccttagctccttctaa

SEQ ID NO: 2610 - RNA, 20 nt, synthetic construct
  source 1..20: mol_type = other RNA
gggatgtcgactcctagggg

SEQ ID NO: 2611 - RNA, 20 nt, synthetic construct
  source 1..20: mol_type = other RNA
cgagggcaccatgcttcaag

SEQ ID NO: 2612 - RNA, 20 nt, synthetic construct
  source 1..20: mol_type = other RNA
aaactcactttatgctaggg

SEQ ID NO: 2613 - RNA, 20 nt, synthetic construct
  source 1..20: mol_type = other RNA
ctcactttatgctagggagg

SEQ ID NO: 2614 - RNA, 20 nt, synthetic construct
  source 1..20: mol_type = other RNA
cttcacctgcatttaaagaa

SEQ ID NO: 2615 - RNA, 20 nt, synthetic construct
  source 1..20: mol_type = other RNA
ccaccagattagctctggcc

SEQ ID NO: 2616 - RNA, 20 nt, synthetic construct
  source 1..20: mol_type = other RNA
ctacctttggtgaacccgtt

SEQ ID NO: 2617 - RNA, 20 nt, synthetic construct
  source 1..20: mol_type = other RNA
atgttccagatgtccagata

SEQ ID NO: 2618 - RNA, 20 nt, synthetic construct
  source 1..20: mol_type = other RNA
tgttccagatgtccagatat

SEQ ID NO: 2619 - RNA, 20 nt, synthetic construct
  source 1..20: mol_type = other RNA
agatagacaaacaagttgga

SEQ ID NO: 2620 - RNA, 20 nt, synthetic construct
  source 1..20: mol_type = other RNA
agcttgcaccaagtcacatg

SEQ ID NO: 2621 - RNA, 20 nt, synthetic construct
  source 1..20: mol_type = other RNA
acccaccttggtgccttctc

SEQ ID NO: 2622 - RNA, 20 nt, synthetic construct
  source 1..20: mol_type = other RNA
tggagtacctgaggaatatc

SEQ ID NO: 2623 - RNA, 20 nt, synthetic construct
  source 1..20: mol_type = other RNA
ttaccccacttaactatctt

SEQ ID NO: 2624 - RNA, 18 nt, synthetic construct
  source 1..18: mol_type = other RNA
taccccacttaactatct

SEQ ID NO: 2625 - RNA, 20 nt, synthetic construct
  source 1..20: mol_type = other RNA
ctcaggtactccaaagattc

SEQ ID NO: 2626 - RNA, 20 nt, synthetic construct
  source 1..20: mol_type = other RNA
catttgccagacagaacctc

SEQ ID NO: 2627 - RNA, 20 nt, synthetic construct
  source 1..20: mol_type = other RNA
aaacaagaccaaaaggctaa

SEQ ID NO: 2628 - RNA, 20 nt, synthetic construct
  source 1..20: mol_type = other RNA
gtaagccaagaaagaaatcc

SEQ ID NO: 2629 - RNA, 20 nt, synthetic construct
  source 1..20: mol_type = other RNA
gcttcagattctgaatgagc

SEQ ID NO: 2630 - RNA, 20 nt, synthetic construct
  source 1..20: mol_type = other RNA
ttaaaacaaaatgaaatgaa

SEQ ID NO: 2631 - RNA, 20 nt, synthetic construct
  source 1..20: mol_type = other RNA
gttcctcagcttccttcaga

SEQ ID NO: 2632 - RNA, 20 nt, synthetic construct
  source 1..20: mol_type = other RNA
caaagagcaagagattctga

SEQ ID NO: 2633 - RNA, 20 nt, synthetic construct
  source 1..20: mol_type = other RNA
aaagagcaagagattctgaa

SEQ ID NO: 2634 - RNA, 20 nt, synthetic construct
  source 1..20: mol_type = other RNA
acacagcactatctgaaacc

SEQ ID NO: 2635 - RNA, 20 nt, synthetic construct
  source 1..20: mol_type = other RNA
cacccagaaaacaacacagc

SEQ ID NO: 2636 - RNA, 20 nt, synthetic construct
  source 1..20: mol_type = other RNA
taccaagttgaaatgaatca

SEQ ID NO: 2637 - RNA, 20 nt, synthetic construct
  source 1..20: mol_type = other RNA
atgaatcaagggcagtccca

SEQ ID NO: 2638 - RNA, 20 nt, synthetic construct
  source 1..20: mol_type = other RNA
agggcagtcccaaggtacag

SEQ ID NO: 2639 - RNA, 20 nt, synthetic construct
  source 1..20: mol_type = other RNA
gttccaaaaaccctcacacc

SEQ ID NO: 2640 - RNA, 20 nt, synthetic construct
  source 1..20: mol_type = other RNA
gaaacagcacttgaatcaac

SEQ ID NO: 2641 - RNA, 20 nt, synthetic construct
  source 1..20: mol_type = other RNA
attacaaataaagaataaag

SEQ ID NO: 2642 - RNA, 20 nt, synthetic construct
  source 1..20: mol_type = other RNA
taatgtccaaatgggactgg

SEQ ID NO: 2643 - RNA, 20 nt, synthetic construct
  source 1..20: mol_type = other RNA
caaagcaagatcttcttcac

SEQ ID NO: 2644 - RNA, 20 nt, synthetic construct
  source 1..20: mol_type = other RNA
acaacaagcttcagttctac

SEQ ID NO: 2645 - RNA, 20 nt, synthetic construct
  source 1..20: mol_type = other RNA
ctgcgcaacttgctcagcaa

SEQ ID NO: 2646 - RNA, 20 nt, synthetic construct
  source 1..20: mol_type = other RNA
cactcagacccctccccaga

SEQ ID NO: 2647 - RNA, 20 nt, synthetic construct
  source 1..20: mol_type = other RNA
tttttccatgttttgttttc

SEQ ID NO: 2648 - RNA, 20 nt, synthetic construct
  source 1..20: mol_type = other RNA
ttacctacacatctgcaaga

SEQ ID NO: 2649 - RNA, 20 nt, synthetic construct
  source 1..20: mol_type = other RNA
acacttacccacttagcaat

SEQ ID NO: 2650 - RNA, 20 nt, synthetic construct
  source 1..20: mol_type = other RNA
catgcagaatggcagcacat

SEQ ID NO: 2651 - RNA, 20 nt, synthetic construct
  source 1..20: mol_type = other RNA
aagctcaggaggagaaaaaa

SEQ ID NO: 2652 - RNA, 20 nt, synthetic construct
  source 1..20: mol_type = other RNA
cgcaagccaggctaaacagt

SEQ ID NO: 2653 - RNA, 20 nt, synthetic construct
  source 1..20: mol_type = other RNA
ttctccccagtctcagccga

SEQ ID NO: 2654 - RNA, 20 nt, synthetic construct
  source 1..20: mol_type = other RNA
tggtcaggaaaagcagccat

SEQ ID NO: 2655 - RNA, 20 nt, synthetic construct
  source 1..20: mol_type = other RNA
ctagtccagggtgtggcttc

SEQ ID NO: 2656 - RNA, 20 nt, synthetic construct
  source 1..20: mol_type = other RNA
ccccaaaatcaacatggcag

SEQ ID NO: 2657 - RNA, 20 nt, synthetic construct
  source 1..20: mol_type = other RNA
tgtgatccagcagccttctt

SEQ ID NO: 2658 - RNA, 20 nt, synthetic construct
  source 1..20: mol_type = other RNA
gaccagatcaaggccataag

SEQ ID NO: 2659 - RNA, 20 nt, synthetic construct
  source 1..20: mol_type = other RNA
caagacaagaaaagcatgaa

SEQ ID NO: 2660 - RNA, 20 nt, synthetic construct
  source 1..20: mol_type = other RNA
ctgaacagggactgttagga

SEQ ID NO: 2661 - RNA, 20 nt, synthetic construct
  source 1..20: mol_type = other RNA
ccagagctcagagtggcaac

SEQ ID NO: 2662 - RNA, 20 nt, synthetic construct
  source 1..20: mol_type = other RNA
ttgctgcagacgccccgtga

SEQ ID NO: 2663 - RNA, 20 nt, synthetic construct
  source 1..20: mol_type = other RNA
ctgcagacgccccgtgacgg

SEQ ID NO: 2664 - RNA, 20 nt, synthetic construct
  source 1..20: mol_type = other RNA
cgacaagcagtgcctttgct

SEQ ID NO: 2665 - RNA, 20 nt, synthetic construct
  source 1..20: mol_type = other RNA
gcccagaacgtgattgacta

SEQ ID NO: 2666 - RNA, 20 nt, synthetic construct
  source 1..20: mol_type = other RNA
tgtgccaggggtgttatgac

SEQ ID NO: 2667 - RNA, 20 nt, synthetic construct
  source 1..20: mol_type = other RNA
cagatccagtctgatggcag

SEQ ID NO: 2668 - RNA, 20 nt, synthetic construct
  source 1..20: mol_type = other RNA
tgtacacgatggtcagccat

SEQ ID NO: 2669 - RNA, 20 nt, synthetic construct
  source 1..20: mol_type = other RNA
ttttaccttggggctctgac

SEQ ID NO: 2670 - RNA, 20 nt, synthetic construct
  source 1..20: mol_type = other RNA
agccccaaggtaaaaaggcc

SEQ ID NO: 2671 - RNA, 20 nt, synthetic construct
  source 1..20: mol_type = other RNA
gagccccaaggtaaaaaggc

SEQ ID NO: 2672 - RNA, 20 nt, synthetic construct
  source 1..20: mol_type = other RNA
cagctcacagtgtgccacca

SEQ ID NO: 2673 - RNA, 20 nt, synthetic construct
  source 1..20: mol_type = other RNA
tatgaccagatggacctggc

SEQ ID NO: 2674 - RNA, 20 nt, synthetic construct
  source 1..20: mol_type = other RNA
actggaccagtatgtcttcc

SEQ ID NO: 2675 - RNA, 20 nt, synthetic construct
  source 1..20: mol_type = other RNA
tgtcttccaggactcccagc

SEQ ID NO: 2676 - RNA, 20 nt, synthetic construct
  source 1..20: mol_type = other RNA
ttcaaccaggagccagcctc

SEQ ID NO: 2677 - RNA, 20 nt, synthetic construct
  source 1..20: mol_type = other RNA
gaccagattcccagtatgtt

SEQ ID NO: 2678 - RNA, 20 nt, synthetic construct
  source 1..20: mol_type = other RNA
taacatactgggaatctggt

SEQ ID NO: 2679 - RNA, 20 nt, synthetic construct
  source 1..20: mol_type = other RNA
aaaggcactgcaagagacaa

SEQ ID NO: 2680 - RNA, 20 nt, synthetic construct
  source 1..20: mol_type = other RNA
ctctggcaaatctctgaggc

SEQ ID NO: 2681 - RNA, 20 nt, synthetic construct
  source 1..20: mol_type = other RNA
agccaagtaccccctcccag

SEQ ID NO: 2682 - RNA, 20 nt, synthetic construct
  source 1..20: mol_type = other RNA
acctcccgagcaaacatgac

SEQ ID NO: 2683 - RNA, 20 nt, synthetic construct
  source 1..20: mol_type = other RNA
ccttacctgtcatgtttgct

SEQ ID NO: 2684 - RNA, 20 nt, synthetic construct
  source 1..20: mol_type = other RNA
tgctctggagatggagaagc

SEQ ID NO: 2685 - RNA, 20 nt, synthetic construct
  source 1..20: mol_type = other RNA
cccacccaatgcccggcagc

SEQ ID NO: 2686 - RNA, 20 nt, synthetic construct
  source 1..20: mol_type = other RNA
aggccattttggaagcttgt

SEQ ID NO: 2687 - RNA, 20 nt, synthetic construct
  source 1..20: mol_type = other RNA
accggctctgcaaaggccag

SEQ ID NO: 2688 - RNA, 20 nt, synthetic construct
  source 1..20: mol_type = other RNA
tggtgcaggccaggctggag

SEQ ID NO: 2689 - RNA, 20 nt, synthetic construct
  source 1..20: mol_type = other RNA
gaacggcagctggcccaagg

SEQ ID NO: 2690 - RNA, 20 nt, synthetic construct
  source 1..20: mol_type = other RNA
ggcccaaggaggcctggctg

SEQ ID NO: 2691 - RNA, 20 nt, synthetic construct
  source 1..20: mol_type = other RNA
gacacgagtgattgctgtgc

SEQ ID NO: 2692 - RNA, 20 nt, synthetic construct
  source 1..20: mol_type = other RNA
ctggtcagggcaagagctat

SEQ ID NO: 2693 - RNA, 20 nt, synthetic construct
  source 1..20: mol_type = other RNA
gggcccacagccactcgtgg

SEQ ID NO: 2694 - RNA, 20 nt, synthetic construct
  source 1..20: mol_type = other RNA
ttccagaagaagctgctccg

SEQ ID NO: 2695 - RNA, 20 nt, synthetic construct
  source 1..20: mol_type = other RNA
cctggtccagagcctgagca

SEQ ID NO: 2696 - RNA, 20 nt, synthetic construct
  source 1..20: mol_type = other RNA
cagacatcaaagtaccctac

SEQ ID NO: 2697 - RNA, 20 nt, synthetic construct
  source 1..20: mol_type = other RNA
acatcaaagtaccctacagg

SEQ ID NO: 2698 - RNA, 20 nt, synthetic construct
  source 1..20: mol_type = other RNA
cgcccaggtcctcacgtctg

SEQ ID NO: 2699 - RNA, 20 nt, synthetic construct
  source 1..20: mol_type = other RNA
cttagtccaacacccaccgc

SEQ ID NO: 2700 - RNA, 20 nt, synthetic construct
  source 1..20: mol_type = other RNA
cctcctgcaatgcttcctgg

SEQ ID NO: 2701 - RNA, 20 nt, synthetic construct
  source 1..20: mol_type = other RNA
gagccagccacagggccccc

SEQ ID NO: 2702 - RNA, 20 nt, synthetic construct
  source 1..20: mol_type = other RNA
ggaagcagaaggtgcttgcg

SEQ ID NO: 2703 - RNA, 20 nt, synthetic construct
  source 1..20: mol_type = other RNA
ggctgcagccggggacactg

SEQ ID NO: 2704 - RNA, 20 nt, synthetic construct
  source 1..20: mol_type = other RNA
ctgccaaattccagcctcct

SEQ ID NO: 2705 - RNA, 20 nt, synthetic construct
  source 1..20: mol_type = other RNA
ggcgggccaagacttctccc

SEQ ID NO: 2706 - RNA, 20 nt, synthetic construct
  source 1..20: mol_type = other RNA
agactcagaggtgagaggag

SEQ ID NO: 2707 - RNA, 20 nt, synthetic construct
  source 1..20: mol_type = other RNA
agcctaggaggcaaagagca

SEQ ID NO: 2708 - RNA, 20 nt, synthetic construct
  source 1..20: mol_type = other RNA
cccccaggctttccccaaac

SEQ ID NO: 2709 - RNA, 20 nt, synthetic construct
  source 1..20: mol_type = other RNA
tcactccagatgctgcaggg

SEQ ID NO: 2710 - RNA, 20 nt, synthetic construct
  source 1..20: mol_type = other RNA
aggctgcaggtggaatcaga

SEQ ID NO: 2711 - RNA, 20 nt, synthetic construct
  source 1..20: mol_type = other RNA
cttcccccagctgaagtcct

SEQ ID NO: 2712 - RNA, 20 nt, synthetic construct
  source 1..20: mol_type = other RNA
cactcacttgagggtttcca

SEQ ID NO: 2713 - RNA, 20 nt, synthetic construct
  source 1..20: mol_type = other RNA
cagactgcggggacacagtg

SEQ ID NO: 2714 - RNA, 20 nt, synthetic construct
  source 1..20: mol_type = other RNA
ccactcaccttagcctgagc

SEQ ID NO: 2715 - RNA, 20 nt, synthetic construct
  source 1..20: mol_type = other RNA
gtacaagctgtcggaaacag

SEQ ID NO: 2716 - RNA, 20 nt, synthetic construct
  source 1..20: mol_type = other RNA
acactcactccatcacccgg

SEQ ID NO: 2717 - RNA, 20 nt, synthetic construct
  source 1..20: mol_type = other RNA
cactcactccatcacccgga

SEQ ID NO: 2718 - RNA, 20 nt, synthetic construct
  source 1..20: mol_type = other RNA
cgtccagtacaacaagttca

SEQ ID NO: 2719 - RNA, 20 nt, synthetic construct
  source 1..20: mol_type = other RNA
ccacatcctgcaagggggga

SEQ ID NO: 2720 - RNA, 20 nt, synthetic construct
  source 1..20: mol_type = other RNA
cacatcctgcaaggggggat

SEQ ID NO: 2721 - RNA, 20 nt, synthetic construct
  source 1..20: mol_type = other RNA
tgggcgtccacatcctgcaa

SEQ ID NO: 2722 - RNA, 20 nt, synthetic construct
  source 1..20: mol_type = other RNA
gggcgtccacatcctgcaag

SEQ ID NO: 2723 - RNA, 20 nt, synthetic construct
  source 1..20: mol_type = other RNA
ggcgtccacatcctgcaagg

SEQ ID NO: 2724 - RNA, 20 nt, synthetic construct
  source 1..20: mol_type = other RNA
gcgtccacatcctgcaaggg

SEQ ID NO: 2725 - RNA, 20 nt, synthetic construct
  source 1..20: mol_type = other RNA
gcccaaggtaagagcttccc

SEQ ID NO: 2726 - RNA, 20 nt, synthetic construct
  source 1..20: mol_type = other RNA
gctcttaccttgggcagcca

SEQ ID NO: 2727 - RNA, 20 nt, synthetic construct
  source 1..20: mol_type = other RNA
agctcttaccttgggcagcc

SEQ ID NO: 2728 - RNA, 20 nt, synthetic construct
  source 1..20: mol_type = other RNA
tgcacctctggggaggacct

SEQ ID NO: 2729 - RNA, 20 nt, synthetic construct
  source 1..20: mol_type = other RNA
ctgcacctctggggaggacc

SEQ ID NO: 2730 - RNA, 20 nt, synthetic construct
  source 1..20: mol_type = other RNA
cgcctgcagctgtcggacac

SEQ ID NO: 2731 - RNA, 20 nt, synthetic construct
  source 1..20: mol_type = other RNA
cacctgccaggccatcacgg

SEQ ID NO: 2732 - RNA, 20 nt, synthetic construct
  source 1..20: mol_type = other RNA
cctctgagaaggaaaaaaga

SEQ ID NO: 2733 - RNA, 20 nt, synthetic construct
  source 1..20: mol_type = other RNA
cagaggaacagtcccaagga

SEQ ID NO: 2734 - RNA, 20 nt, synthetic construct
  source 1..20: mol_type = other RNA
cactcacctgcccacagcag

SEQ ID NO: 2735 - RNA, 20 nt, synthetic construct
  source 1..20: mol_type = other RNA
ccactcacctgcccacagca

SEQ ID NO: 2736 - RNA, 20 nt, synthetic construct
  source 1..20: mol_type = other RNA
gccactcacctgcccacagc

SEQ ID NO: 2737 - RNA, 20 nt, synthetic construct
  source 1..20: mol_type = other RNA
agggcccctgtggggaaacg

SEQ ID NO: 2738 - RNA, 20 nt, synthetic construct
  source 1..20: mol_type = other RNA
gggcccctgtggggaaacga

SEQ ID NO: 2739 - RNA, 20 nt, synthetic construct
  source 1..20: mol_type = other RNA
gcaagtgcaggagtcagtga

SEQ ID NO: 2740 - RNA, 20 nt, synthetic construct
  source 1..20: mol_type = other RNA
cggaaccagtaaccatgaac

SEQ ID NO: 2741 - RNA, 20 nt, synthetic construct
  source 1..20: mol_type = other RNA
ggaaccagtaaccatgaact

SEQ ID NO: 2742 - RNA, 20 nt, synthetic construct
  source 1..20: mol_type = other RNA
gaaccagtaaccatgaactg

SEQ ID NO: 2743 - RNA, 20 nt, synthetic construct
  source 1..20: mol_type = other RNA
gctagatcaagaagtacagg

SEQ ID NO: 2744 - RNA, 20 nt, synthetic construct
  source 1..20: mol_type = other RNA
agaagtacaggaggagactc

SEQ ID NO: 2745 - RNA, 20 nt, synthetic construct
  source 1..20: mol_type = other RNA
caagtctagtgaggagaaag

SEQ ID NO: 2746 - RNA, 20 nt, synthetic construct
  source 1..20: mol_type = other RNA
aagtctagtgaggagaaaga

SEQ ID NO: 2747 - RNA, 20 nt, synthetic construct
  source 1..20: mol_type = other RNA
agtctagtgaggagaaagag

SEQ ID NO: 2748 - RNA, 20 nt, synthetic construct
  source 1..20: mol_type = other RNA
acaggcccaggacacagagc

SEQ ID NO: 2749 - RNA, 20 nt, synthetic construct
  source 1..20: mol_type = other RNA
acctgtcaggtgaagttcgc

SEQ ID NO: 2750 - RNA, 20 nt, synthetic construct
  source 1..20: mol_type = other RNA
acttacaggtgacgttgagc

SEQ ID NO: 2751 - RNA, 20 nt, synthetic construct
  source 1..20: mol_type = other RNA
aacatctaggagaggaagag

SEQ ID NO: 2752 - RNA, 20 nt, synthetic construct
  source 1..20: mol_type = other RNA
gttccacagaacccaacaac

SEQ ID NO: 2753 - RNA, 20 nt, synthetic construct
  source 1..20: mol_type = other RNA
ttcctacctgagccatctcc

SEQ ID NO: 2754 - RNA, 20 nt, synthetic construct
  source 1..20: mol_type = other RNA
atgctcacatgaagaagatg

SEQ ID NO: 2755 - RNA, 20 nt, synthetic construct
  source 1..20: mol_type = other RNA
gggaaacaagagaccagagc

SEQ ID NO: 2756 - RNA, 20 nt, synthetic construct
  source 1..20: mol_type = other RNA
tcactctgatgggagacacc

SEQ ID NO: 2757 - RNA, 20 nt, synthetic construct
  source 1..20: mol_type = other RNA
cactctgatgggagacacca

SEQ ID NO: 2758 - RNA, 20 nt, synthetic construct
  source 1..20: mol_type = other RNA
tttcttatggagaggaaaga

SEQ ID NO: 2759 - RNA, 20 nt, synthetic construct
  source 1..20: mol_type = other RNA
gtacaggtaagagcaacgcc

SEQ ID NO: 2760 - RNA, 20 nt, synthetic construct
  source 1..20: mol_type = other RNA
ttacctgtaccataaccagg

SEQ ID NO: 2761 - RNA, 20 nt, synthetic construct
  source 1..20: mol_type = other RNA
tgtatctgtaggaggagaag

SEQ ID NO: 2762 - RNA, 20 nt, synthetic construct
  source 1..20: mol_type = other RNA
gtatctgtaggaggagaagt

SEQ ID NO: 2763 - RNA, 20 nt, synthetic construct
  source 1..20: mol_type = other RNA
cagatacaaactggactctc

SEQ ID NO: 2764 - RNA, 20 nt, synthetic construct
  source 1..20: mol_type = other RNA
tcttaccttccttcgtttgc

SEQ ID NO: 2765 - RNA, 20 nt, synthetic construct
  source 1..20: mol_type = other RNA
tttggatctaaaacggtgac

SEQ ID NO: 2766 - RNA, 20 nt, synthetic construct
  source 1..20: mol_type = other RNA
gatctaaaacggtgacaggt

SEQ ID NO: 2767 - RNA, 20 nt, synthetic construct
  source 1..20: mol_type = other RNA
aaaggctcagcagttgacct

SEQ ID NO: 2768 - RNA, 20 nt, synthetic construct
  source 1..20: mol_type = other RNA
atttaccggcatagaatagt

SEQ ID NO: 2769 - RNA, 20 nt, synthetic construct
  source 1..20: mol_type = other RNA
tcactgcctaagagagacat

SEQ ID NO: 2770 - RNA, 20 nt, synthetic construct
  source 1..20: mol_type = other RNA
aggatccacgtggagaatgg

SEQ ID NO: 2771 - RNA, 20 nt, synthetic construct
  source 1..20: mol_type = other RNA
ggatccacgtggagaatggt

SEQ ID NO: 2772 - RNA, 20 nt, synthetic construct
  source 1..20: mol_type = other RNA
tctcactgttctcagggaag

SEQ ID NO: 2773 - RNA, 20 nt, synthetic construct
  source 1..20: mol_type = other RNA
cctgcccaaggcttcccacc

SEQ ID NO: 2774 - RNA, 20 nt, synthetic construct
  source 1..20: mol_type = other RNA
ctgcccaaggcttcccacct

SEQ ID NO: 2775 - RNA, 20 nt, synthetic construct
  source 1..20: mol_type = other RNA
gcctgctgcggtaagcggta

SEQ ID NO: 2776 - RNA, 20 nt, synthetic construct
  source 1..20: mol_type = other RNA
gatgctcagggaacacgtat

SEQ ID NO: 2777 - RNA, 20 nt, synthetic construct
  source 1..20: mol_type = other RNA
ttctcaaagttcccacatcc

SEQ ID NO: 2778 - RNA, 20 nt, synthetic construct
  source 1..20: mol_type = other RNA
tcacagattggtgagtagcc

SEQ ID NO: 2779 - RNA, 20 nt, synthetic construct
  source 1..20: mol_type = other RNA
ctcacctgttctgtgattac

SEQ ID NO: 2780 - RNA, 20 nt, synthetic construct
  source 1..20: mol_type = other RNA
tccttccagctactcaatcc

SEQ ID NO: 2781 - RNA, 20 nt, synthetic construct
  source 1..20: mol_type = other RNA
cacagtacaaataagagccc

SEQ ID NO: 2782 - RNA, 20 nt, synthetic construct
  source 1..20: mol_type = other RNA
ccccccagcgcttcggtgag

SEQ ID NO: 2783 - RNA, 20 nt, synthetic construct
  source 1..20: mol_type = other RNA
cccccagcgcttcggtgagt

SEQ ID NO: 2784 - RNA, 20 nt, synthetic construct
  source 1..20: mol_type = other RNA
ccactcaccgaagcgctggg

SEQ ID NO: 2785 - RNA, 20 nt, synthetic construct
  source 1..20: mol_type = other RNA
tacctcggaggaaagagaaa

SEQ ID NO: 2786 - RNA, 20 nt, synthetic construct
  source 1..20: mol_type = other RNA
cagcttccaaaacgacaagc

SEQ ID NO: 2787 - RNA, 20 nt, synthetic construct
  source 1..20: mol_type = other RNA
aacataccagcttgtcgttt

SEQ ID NO: 2788 - RNA, 20 nt, synthetic construct
  source 1..20: mol_type = other RNA
agaccacctgcagagacgag

SEQ ID NO: 2789 - RNA, 20 nt, synthetic construct
  source 1..20: mol_type = other RNA
ccacctgcagagacgagagg

SEQ ID NO: 2790 - RNA, 20 nt, synthetic construct
  source 1..20: mol_type = other RNA
ccacacccaaaaggccacac

SEQ ID NO: 2791 - RNA, 20 nt, synthetic construct
  source 1..20: mol_type = other RNA
cccaccagctcagctccacg

SEQ ID NO: 2792 - RNA, 20 nt, synthetic construct
  source 1..20: mol_type = other RNA
cgctgtcaagtccagttcta

SEQ ID NO: 2793 - RNA, 20 nt, synthetic construct
  source 1..20: mol_type = other RNA
gctgtcaagtccagttctac

SEQ ID NO: 2794 - RNA, 20 nt, synthetic construct
  source 1..20: mol_type = other RNA
cacccagatcgtcagcgccg

SEQ ID NO: 2795 - RNA, 20 nt, synthetic construct
  source 1..20: mol_type = other RNA
ccactcacctgctctacccc

SEQ ID NO: 2796 - RNA, 20 nt, synthetic construct
  source 1..20: mol_type = other RNA
ccacagtctgaaagaaagca

SEQ ID NO: 2797 - RNA, 20 nt, synthetic construct
  source 1..20: mol_type = other RNA
gacactgttggcacggagga

SEQ ID NO: 2798 - RNA, 20 nt, synthetic construct
  source 1..20: mol_type = other RNA
ttaccatggccatcaacaca

SEQ ID NO: 2799 - RNA, 20 nt, synthetic construct
  source 1..20: mol_type = other RNA
ccacagtctgaaagaaaaca

SEQ ID NO: 2800 - RNA, 20 nt, synthetic construct
  source 1..20: mol_type = other RNA
cacagtctgaaagaaaacag

SEQ ID NO: 2801 - RNA, 20 nt, synthetic construct
  source 1..20: mol_type = other RNA
ttaccatggccatcagcacg

SEQ ID NO: 2802 - RNA, 20 nt, synthetic construct
  source 1..20: mol_type = other RNA
tctgcgttcaggggtaagcg

SEQ ID NO: 2803 - RNA, 20 nt, synthetic construct
  source 1..20: mol_type = other RNA
gcgcttacccctgaacgcag

SEQ ID NO: 2804 - RNA, 20 nt, synthetic construct
  source 1..20: mol_type = other RNA
gactgggcagcggcccctgt

SEQ ID NO: 2805 - RNA, 20 nt, synthetic construct
  source 1..20: mol_type = other RNA
ggactgggcagcggcccctg

SEQ ID NO: 2806 - RNA, 20 nt, synthetic construct
  source 1..20: mol_type = other RNA
gtcatgcagcccttgcctgc

SEQ ID NO: 2807 - RNA, 20 nt, synthetic construct
  source 1..20: mol_type = other RNA
tcatgcagcccttgcctgct

SEQ ID NO: 2808 - RNA, 20 nt, synthetic construct
  source 1..20: mol_type = other RNA
catgcagcccttgcctgctg

SEQ ID NO: 2809 - RNA, 20 nt, synthetic construct
  source 1..20: mol_type = other RNA
ctcaccagattcccgaaggt

SEQ ID NO: 2810 - RNA, 20 nt, synthetic construct
  source 1..20: mol_type = other RNA
cagactcaccagattcccga

SEQ ID NO: 2811 - RNA, 20 nt, synthetic construct
  source 1..20: mol_type = other RNA
agcctaggcaagtgcagagg

SEQ ID NO: 2812 - RNA, 20 nt, synthetic construct
  source 1..20: mol_type = other RNA
cagcctaggcaagtgcagag

SEQ ID NO: 2813 - RNA, 20 nt, synthetic construct
  source 1..20: mol_type = other RNA
accagcctaggcaagtgcag

SEQ ID NO: 2814 - RNA, 20 nt, synthetic construct
  source 1..20: mol_type = other RNA
tggaaccccaataccagcct

SEQ ID NO: 2815 - RNA, 20 nt, synthetic construct
  source 1..20: mol_type = other RNA
cacctgcagaagatgccaga

SEQ ID NO: 2816 - RNA, 20 nt, synthetic construct
  source 1..20: mol_type = other RNA
cgctcacctgcaccagcctc

SEQ ID NO: 2817 - RNA, 20 nt, synthetic construct
  source 1..20: mol_type = other RNA
cttcctggcaagacacaaga

SEQ ID NO: 2818 - RNA, 20 nt, synthetic construct
  source 1..20: mol_type = other RNA
aattcagggagccattgaaa

SEQ ID NO: 2819 - RNA, 20 nt, synthetic construct
  source 1..20: mol_type = other RNA
ctactgacctgccttttcaa

SEQ ID NO: 2820 - RNA, 20 nt, synthetic construct
  source 1..20: mol_type = other RNA
gcctctcaaagtcttatgtg

SEQ ID NO: 2821 - RNA, 20 nt, synthetic construct
  source 1..20: mol_type = other RNA
ttcccatgctgctttacttc

SEQ ID NO: 2822 - RNA, 20 nt, synthetic construct
  source 1..20: mol_type = other RNA
tttaggtcaaccagatgtag

SEQ ID NO: 2823 - RNA, 20 nt, synthetic construct
  source 1..20: mol_type = other RNA
tgtgcctgaaagcaaaaatg

SEQ ID NO: 2824 - RNA, 20 nt, synthetic construct
  source 1..20: mol_type = other RNA
ttacctactattcttgccag

SEQ ID NO: 2825 - RNA, 20 nt, synthetic construct
  source 1..20: mol_type = other RNA
aaatgctgtttaaaaaaagg

SEQ ID NO: 2826 - RNA, 20 nt, synthetic construct
  source 1..20: mol_type = other RNA
ccccaaaaagtgaatatcaa

SEQ ID NO: 2827 - RNA, 20 nt, synthetic construct
  source 1..20: mol_type = other RNA
cgcggcgcagtacccgctgc

SEQ ID NO: 2828 - RNA, 20 nt, synthetic construct
  source 1..20: mol_type = other RNA
cactcaccgtggtgggtcgg

SEQ ID NO: 2829 - RNA, 20 nt, synthetic construct
  source 1..20: mol_type = other RNA
actcaccgtggtgggtcgga

SEQ ID NO: 2830 - RNA, 20 nt, synthetic construct
  source 1..20: mol_type = other RNA
tggctccctgtggggcaacg

SEQ ID NO: 2831 - RNA, 20 nt, synthetic construct
  source 1..20: mol_type = other RNA
gattccagggggaggcggtg

SEQ ID NO: 2832 - RNA, 20 nt, synthetic construct
  source 1..20: mol_type = other RNA
gctcctacctgtgctggacc

SEQ ID NO: 2833 - RNA, 20 nt, synthetic construct
  source 1..20: mol_type = other RNA
tcgccgccacagtggggtcg

SEQ ID NO: 2834 - RNA, 20 nt, synthetic construct
  source 1..20: mol_type = other RNA
cagactgagagtggggagag

SEQ ID NO: 2835 - RNA, 20 nt, synthetic construct
  source 1..20: mol_type = other RNA
cctcctccagagtgtggttg

SEQ ID NO: 2836 - RNA, 20 nt, synthetic construct
  source 1..20: mol_type = other RNA
agccatcccagggagagagc

SEQ ID NO: 2837 - RNA, 20 nt, synthetic construct
  source 1..20: mol_type = other RNA
gccatcccagggagagagct

SEQ ID NO: 2838 - RNA, 20 nt, synthetic construct
  source 1..20: mol_type = other RNA
ccatcccagggagagagctg

SEQ ID NO: 2839 - RNA, 20 nt, synthetic construct
  source 1..20: mol_type = other RNA
ctcacaggccacccaccagc

SEQ ID NO: 2840 - RNA, 20 nt, synthetic construct
  source 1..20: mol_type = other RNA
ccgcttccagaagtgcctgg

SEQ ID NO: 2841 - RNA, 20 nt, synthetic construct
  source 1..20: mol_type = other RNA
cttccagaagtgcctggcgg

SEQ ID NO: 2842 - RNA, 20 nt, synthetic construct
  source 1..20: mol_type = other RNA
acaactgcaaaggaatgggt

SEQ ID NO: 2843 - RNA, 20 nt, synthetic construct
  source 1..20: mol_type = other RNA
caactgcaaaggaatgggta

SEQ ID NO: 2844 - RNA, 20 nt, synthetic construct
  source 1..20: mol_type = other RNA
gaactaggaagacggtccag

SEQ ID NO: 2845 - RNA, 20 nt, synthetic construct
  source 1..20: mol_type = other RNA
ggctgaccaggacctgttgc

SEQ ID NO: 2846 - RNA, 20 nt, synthetic construct
  source 1..20: mol_type = other RNA
ctcacctgtacgccaggcgg

SEQ ID NO: 2847 - RNA, 20 nt, synthetic construct
  source 1..20: mol_type = other RNA
gctctcacctgtacgccagg

SEQ ID NO: 2848 - RNA, 20 nt, synthetic construct
  source 1..20: mol_type = other RNA
cttagacctggcaggcagat

SEQ ID NO: 2849 - RNA, 20 nt, synthetic construct
  source 1..20: mol_type = other RNA
caatccagtccccgaagcca

SEQ ID NO: 2850 - RNA, 20 nt, synthetic construct
  source 1..20: mol_type = other RNA
aatccagtccccgaagccac

SEQ ID NO: 2851 - RNA, 20 nt, synthetic construct
  source 1..20: mol_type = other RNA
actcaccggtgatgaggaca

SEQ ID NO: 2852 - RNA, 20 nt, synthetic construct
  source 1..20: mol_type = other RNA
ctcaccggtgatgaggacaa

SEQ ID NO: 2853 - RNA, 20 nt, synthetic construct
  source 1..20: mol_type = other RNA
ccggtctgcgggaagggtac

SEQ ID NO: 2854 - RNA, 20 nt, synthetic construct
  source 1..20: mol_type = other RNA
tgggctgcaggagccgcggc

SEQ ID NO: 2855 - RNA, 20 nt, synthetic construct
  source 1..20: mol_type = other RNA
ttgtaccaaatgcccctgtc

SEQ ID NO: 2856 - RNA, 20 nt, synthetic construct
  source 1..20: mol_type = other RNA
cggacagcagtcctccatta

SEQ ID NO: 2857 - RNA, 20 nt, synthetic construct
  source 1..20: mol_type = other RNA
aggtgcagcacagccccatg

SEQ ID NO: 2858 - RNA, 20 nt, synthetic construct
  source 1..20: mol_type = other RNA
ggtgcagcacagccccatgt

SEQ ID NO: 2859 - RNA, 20 nt, synthetic construct
  source 1..20: mol_type = other RNA
agttgccagatgcgcttcga

SEQ ID NO: 2860 - RNA, 20 nt, synthetic construct
  source 1..20: mol_type = other RNA
gttgccagatgcgcttcgac

SEQ ID NO: 2861 - RNA, 20 nt, synthetic construct
  source 1..20: mol_type = other RNA
gtctcagctgctcgacacgc

SEQ ID NO: 2862 - RNA, 20 nt, synthetic construct
  source 1..20: mol_type = other RNA
ttcttaccctggaatagtcc

SEQ ID NO: 2863 - RNA, 20 nt, synthetic construct
  source 1..20: mol_type = other RNA
attacctgtatgctaatcga

SEQ ID NO: 2864 - RNA, 20 nt, synthetic construct
  source 1..20: mol_type = other RNA
ttgcaatgcgttcgtggctt

SEQ ID NO: 2865 - RNA, 20 nt, synthetic construct
  source 1..20: mol_type = other RNA
actgacctgtgaccatagcc

SEQ ID NO: 2866 - RNA, 20 nt, synthetic construct
  source 1..20: mol_type = other RNA
tatctgcagggacagagaaa

SEQ ID NO: 2867 - RNA, 20 nt, synthetic construct
  source 1..20: mol_type = other RNA
tgcggcgcagacatacagct

SEQ ID NO: 2868 - RNA, 20 nt, synthetic construct
  source 1..20: mol_type = other RNA
ccccgcaggcgggggcgtta

SEQ ID NO: 2869 - RNA, 20 nt, synthetic construct
  source 1..20: mol_type = other RNA
tttcagaagtgtctcagtgt

SEQ ID NO: 2870 - RNA, 20 nt, synthetic construct
  source 1..20: mol_type = other RNA
attacctgatggaaagtctg

SEQ ID NO: 2871 - RNA, 20 nt, synthetic construct
  source 1..20: mol_type = other RNA
cttcagtgccttcgtggatt

SEQ ID NO: 2872 - RNA, 20 nt, synthetic construct
  source 1..20: mol_type = other RNA
tttctgcagagggatagaga

SEQ ID NO: 2873 - RNA, 20 nt, synthetic construct
  source 1..20: mol_type = other RNA
agaccaccagagtaagggac

SEQ ID NO: 2874 - RNA, 20 nt, synthetic construct
  source 1..20: mol_type = other RNA
acttgcagccctcggccaaa

SEQ ID NO: 2875 - RNA, 20 nt, synthetic construct
  source 1..20: mol_type = other RNA
gcttgcagctgtgggacacc

SEQ ID NO: 2876 - RNA, 20 nt, synthetic construct
  source 1..20: mol_type = other RNA
gaccactcaaccagtgccca

SEQ ID NO: 2877 - RNA, 20 nt, synthetic construct
  source 1..20: mol_type = other RNA
ggaggcacagaccactccac

SEQ ID NO: 2878 - RNA, 20 nt, synthetic construct
  source 1..20: mol_type = other RNA
ggcacagacaactcgactga

SEQ ID NO: 2879 - RNA, 20 nt, synthetic construct
  source 1..20: mol_type = other RNA
gcacagaccactcaacccac

SEQ ID NO: 2880 - RNA, 20 nt, synthetic construct
  source 1..20: mol_type = other RNA
gaccactcaacccacaggcc

SEQ ID NO: 2881 - RNA, 20 nt, synthetic construct
  source 1..20: mol_type = other RNA
gaccactcaaaccacagcca

SEQ ID NO: 2882 - RNA, 20 nt, synthetic construct
  source 1..20: mol_type = other RNA
gaccactcaacccacagcca

SEQ ID NO: 2883 - RNA, 20 nt, synthetic construct
  source 1..20: mol_type = other RNA
gaccactcaaccagcagcca

SEQ ID NO: 2884 - RNA, 20 nt, synthetic construct
  source 1..20: mol_type = other RNA
tttactatgtctcagtggat

SEQ ID NO: 2885 - RNA, 20 nt, synthetic construct
  source 1..20: mol_type = other RNA
ctttactatgtctcagtgga

SEQ ID NO: 2886 - RNA, 20 nt, synthetic construct
  source 1..20: mol_type = other RNA
agccagaagctgggaatttc

SEQ ID NO: 2887 - RNA, 20 nt, synthetic construct
  source 1..20: mol_type = other RNA
tatcatgtcgttattaactg

SEQ ID NO: 2888 - RNA, 20 nt, synthetic construct
  source 1..20: mol_type = other RNA
cacctacctaagaaccatcc

SEQ ID NO: 2889 - RNA, 20 nt, synthetic construct
  source 1..20: mol_type = other RNA
ggacccagactagcagcacc

SEQ ID NO: 2890 - RNA, 20 nt, synthetic construct
  source 1..20: mol_type = other RNA
agggctcaccagaggtagga

SEQ ID NO: 2891 - RNA, 20 nt, synthetic construct
  source 1..20: mol_type = other RNA
ttcacctgcccaaggaaaaa

SEQ ID NO: 2892 - RNA, 20 nt, synthetic construct
  source 1..20: mol_type = other RNA
ctaagcctagaaaatcagtt

SEQ ID NO: 2893 - RNA, 20 nt, synthetic construct
  source 1..20: mol_type = other RNA
acatctagaaaaaaaaatac

SEQ ID NO: 2894 - RNA, 20 nt, synthetic construct
  source 1..20: mol_type = other RNA
attaccttcctctttgcact

SEQ ID NO: 2895 - RNA, 20 nt, synthetic construct
  source 1..20: mol_type = other RNA
gatcctgtaggttggaacat

SEQ ID NO: 2896 - RNA, 20 nt, synthetic construct
  source 1..20: mol_type = other RNA
aagccaccccaagttagatc

SEQ ID NO: 2897 - RNA, 20 nt, synthetic construct
  source 1..20: mol_type = other RNA
aacttaccccaaacaattag

SEQ ID NO: 2898 - RNA, 20 nt, synthetic construct
  source 1..20: mol_type = other RNA
atacctacaggatttaaagt

SEQ ID NO: 2899 - RNA, 20 nt, synthetic construct
  source 1..20: mol_type = other RNA
gtttcctagaaagcaaaaaa

SEQ ID NO: 2900 - RNA, 20 nt, synthetic construct
  source 1..20: mol_type = other RNA
aagttcaactgcttcgtaat

SEQ ID NO: 2901 - RNA, 20 nt, synthetic construct
  source 1..20: mol_type = other RNA
aattcagactatcatcctca

SEQ ID NO: 2902 - RNA, 20 nt, synthetic construct
  source 1..20: mol_type = other RNA
gtttctgcagccgctttggg

SEQ ID NO: 2903 - RNA, 20 nt, synthetic construct
  source 1..20: mol_type = other RNA
ttacctggagccacccaaag

SEQ ID NO: 2904 - RNA, 20 nt, synthetic construct
  source 1..20: mol_type = other RNA
tcactaggtgagcaaaagag

SEQ ID NO: 2905 - RNA, 20 nt, synthetic construct
  source 1..20: mol_type = other RNA
gcctctccagccaggggctg

SEQ ID NO: 2906 - RNA, 20 nt, synthetic construct
  source 1..20: mol_type = other RNA
cttggcagcatcagccagac

SEQ ID NO: 2907 - RNA, 20 nt, synthetic construct
  source 1..20: mol_type = other RNA
ccactgggcgggaaagagaa

SEQ ID NO: 2908 - RNA, 20 nt, synthetic construct
  source 1..20: mol_type = other RNA
acatactcgaggcctggccc

SEQ ID NO: 2909 - DNA, 27 bp, Homo sapiens
  source 1..27: mol_type = genomic DNA
ccctcaccctgagatggggtaaggagg

SEQ ID NO: 2910 - DNA, 27 bp, Homo sapiens
  source 1..27: mol_type = genomic DNA
cctgcaccctgagatggagtaaggagg

SEQ ID NO: 2911 - DNA, 27 bp, Homo sapiens
  source 1..27: mol_type = genomic DNA
ccctcaccctgagctggggtaaggagg
